United States Patent Application Publication US 2026/0191916 A1 - sequence listing, part 44

SEQ ID NO: 160 - DNA, 1318371 bp, Phocaeicola dorei
  source 1..1318371: mol_type = genomic DNA
acggcaagcaggattacaaataacaggattatgactggtgttctcattttctaatgtttaatgttctgtggcaaccaatcttgtttagggagttgagccatttgttaatagcatccaatctgttattctgtttaatggtatcttcatttctacataatttgatttgccgaataacagagttctgcataattgaatcggatttgaaaagcagttctaaaacggcttcataacatttggaatatctggacaattcatccaatatatttgcgtcttttagaatatacaggttgaaattgtacacaaatgacttgtaactgaaaatctccgactgtaatgctgctgcatcaagacaagtataaaacaattccttatcgtgctgatatagccacatataatcagatgggttcaggttgtagtgcaataaagtttccgaacggacaaatggaagccccgtatttgagcctaccagataacggtatgtctcattgactattgactcaactatttcaatggattctgattgtttgtccgattcccgtatttctgtaaatgtatcggcaataagaacttccacatcctgcgatttgtaatatataccgtttttttgccagcggaatctacggatatattcttcagaagtcggacaacagaacagtaaagtatttaacaatcggttcagatatattcgcttatctggaatatgacaacggtgtaaccctattatggagccataagcgtatagctttccaaactcgttttcctccgaatttgaatttttaggcatgtaatacaaccgcacaatattggaaatgaaataatatatatcaagatatttcaatgtatcagccgattctccatatttgttaagtaaatgccgctccagtttctcgccataccataagtagccatcgggatttatttgaaacaaccgatgaaacttaggtcttgataatgaaaagttcttgtttctacttttcattcgttccagtaaggcgacaataattctattcgttatatccatagctgtaatgtttggtggctaaccgacctttaaggggaggttgagccgcttgttaatcgtctttattggattgaatgtattattaaagatacttcgtctttttgataaagataagtttttattatacaagatgttttttgtaatgataaaaaaactttaaccgacgcttcacaatagggagacaaagaatcaaataggactaattcagtagaatcccattttacttcaacttcttctatcggttctgccccagttactatatcattctccagaagtttttccaccgttagataatcgggagcatacttccaacgaattattaaaattgctccatctttatttactatgcgtgtagccatcggttcatctcccattaccaataagacatgattgtctatatagattttccccaagtaatctgttacgctacatatagcattgtagttttcttgacccttccattgatgggcatattgttgctcaacaatgacaaatgggcttcctgatgtttcaatccaattattcatatttttctcagcgattaatgtttggcagcgtgccgccttattcagtcggtagtgctgtttgttataaactcttttttctttattcttttgccgttacatgtaaagccataagtaaaagctgcatctatggcttgttttgcactctcaagaatataatgatacaaattatcatatttactaaagcatggagaaagaatgtagaagtttttaatatttaaaggaatataaatccccgtcatatcggatattccatagcgtgcttcctccaaatttggtactggtatggaaatagatatttcaaactctttattagatgggaaacgttttgcccgtttgaaaatcccaatccccccattagtatttcgaagatttatctgtatgagaagtttccaatctcccaaatcatctaagttgatttggttattgtaatcttccatataaccattcaactctcggtaaattgagcgcagtaagtccaattctccaagttcggggatttcactacttattaaaactgcatattgattattcatacattcatccttatatccagagtttataatgttatgcagcttgccgccgttaggtggcacaggtgcttgttatcagtcaattttatttcaaatcttctttatttatagtaattattctattcggtataaaaaactgagatgtttccacatctatgctgtttgatatatagcacttccaagatttcacgtatcgaaaattctttttgattttacgataaaatttggaaaccatttgagaaaaatcattattatcagaacagcaataaaaacgtccagcaatgtatgccatatcttccctttgaaaaggaactctatattctaaaactggacttttcacatagtccaatacttcagctgttgttccatcataatattcatgtgtataatatgatatatattgttggaaagattttccagtcaaatacatcagccgatcattagcacaaatgtcaaaaggggataaatctcctttataacgtggaacacacaacaactctccaaatacacttctaagcgtatttgcaatcatctcatcatcatttttatacgaatagaattcaaattgttttcccatgttcaactggttttaatgactgataatgtttggtggataatcatcattaaaggagattgatccgcttgttatctgcccgctttattcctcttcttcgatgaaatgatttataaagtaattgaatgactgggcgatgtaacgagtatttgtttcaaagttgtattctcttgaagcgttttcgtcccactcgtcagtcaagtaatagtaaatctttttattcttcaagttcaacgcataatagtttccacccgaatccatagcaaaaggcaacaggttgcttggcattagatttctgctccacatgtctttggctatgacttcaattgtttcaaaagcattggtgcgttcctttatcggaaagaacgcatttatctccacccaatccaaatcctcgtcctgcggttgaaaacaatatggtgatggcataccaccgttgaacttgaggtaaaagttcttcatgcctgccggaatctttacattcaactcaacctcaaaattctttatatcttcttttgttagcgaagccgaacagtccgaaagttcaggcattacaccttctatttctataatctccgtttgttgttcctcttcgatttttgggaaagcaacgagattattgaaaaaatcatctattgaatccgctatcaattgaggttcatcaaaaataaatgcatcgctattttttacaaaaccaataattttataaaaatatacagctctgttttttatattgattgcaattacaccaatatttctcaaattgttatgtccactggcaaatagcagaatattgtcagaaatcgaattagaactacgatgctccaaggtttctccttcaacagtatgaaaaagagcattcttaaaactcttattatatttgaacggttggaaaattataatttccacttcgtgatatttgtttatggagatggtttgctgtttaggttctcctccattatattgcaaatagaactctttcagtctttccggcaaggcataccccaatttactctcaatttcttcaaaatctttgagagtaagacttttttgacaattttctaattctattttcatattcattctttttatgggcagataatgtttggcggataatcgaccttagggagattgatccgcttgttagccaccgttaatttaccatcttgttgtttcacatatgtttttgaaacgatccaatatcatatttgattttacgtcatttcctaaatttattcttatccattttaagttaggcagatttattggtgttacatcacgaaatgaatctacacccaacataggtacattcttttccacatccaaactttctaattcacggttcaatgtaggcatttgttccaatcgtttcatattgcatattccaatacggcgtaaattgggaaggttacacaagtttggaacatgtgataaattacttaatccgtaaagatagatacattgtatcatcttcatacccaaaagaaaattcaaatctcttattttaggggacttatatatggttatagatttaagatttggcatcttatatcctaattgtgttccatcttttagattatgacatttcaaattttcaagattgggaagtttatccaataacattgaatccaaacctttgacctctaatctccgtaggctaaatagttgatttatagtttcatactggcgcatgtccaaatcgccatttaaaaccagtccgagtatttcaagtttctctaattggactaattcgtcaagcactattttatcatcatataaatcgcttataataagcttattcaaatttctaaaaattgatatgcctatgatacttgtcaatactcttttacggttatatatttctatatcaacaaccttttcagccaaacactcaaaaacgtcaaatttaataatattgttgtcttcggcacataagcagagctgaatgttggtatcgctttttatagcatactttctaagatgttcgaggttgcatctattcggttgttcagatataattaaccgaattacattctctttttcttgtaaggacgcaatttgttcctcgctatatttattcaaattctctataaccatattatttttcaggtggctaatgttcaatagcgttccgctttaagcagtagtgctgtttgttactaacgaattcattcattaattgatgctttcattttttctacaattacatcaatatattgttgtggaatgtttttatttttatagttctcaatagcatcaagaatactttgtttcaatatctcaacacattgagaatcatttgctgtttcaaatttatcaaatgggagtagaatttccaattctatccgattacgttttttcgaatatcgacttaatggatttgtagtaaatccttttaagcagaatacatagaaacttagttcattaatatatgaaatatcacatagacaatccatatattctattacagagtttcttgctttacgaaacttatcagaaatactatgttccaattcacctccaataaaaactttcatacaaatttgttatcgttagtaatgtatagcagcgttccgcttattcagtcggtttgctgtttgttagtagcgtcctaagattcgttacttgttctgttatattctcgcattccaattcagagcaatagaaccggggatgtttaactccttgtttatagcaatcatgggctaaatcatcaagtttttggattgcgctatcaaaccattcatattcttctttgctgataagataatatcgttcaaaccaaaaccaatgacagataatgactatcattatgtattgttcaattaaaggattaaatccaaccgaatagaatccatcgtttcttatcttttcatttaataattccatcttctcacgtttacgctactaatggctaagcggggaacgctggtaggcgttatcacgcttcgttagtaatctgttattgcactcgtttcaaatctccgatagattggagtgacatttctatgtagggaatagtttttagaatatggatgttatctattgcttctttaccacccaatgccaatgccggaacataaccgtaacattcgtctaatgccggaatacctttggctgattttattatgggatattcatctaaggaaaaccatgaagacaagcagcccttattgaataatacgatattaaacagaatatcgaccttatcagataaaatcctgaatgttccgtatctcacattgacaaagacgacataatcacctatcctgcaatctttcacataggcaaatatatcaccgaaaactgttgtcataaatggtgtggcagaaccaaaacccgccatcggatagcaatcatctattattgcctgatattcattaggttcaataatcctaaataatccctcgcaaaacattccaaatccaacttctttccaaagtgtgattatgttctccgatacgacattggcatatttagcaataaaagcatcatctaccgtttggcagatgctactggggttcttatctaaaaacttttcgtacatatttgttgaactttgattactaatgtttggtggctaaccgaccttttcaggggaggttaagccgcttgttattctttcaatttggatatggagtgtaatattacagatcttctattggttatacaggtttcttcacatatacaagcaattccatcagacaatattatggcaaagccaaaattcgactgtattcctgcatttatagcctctgatatatctgcccatttttgatccagctcaaaaaaaccgatgcaatatccttctttctctttagataattcacgaagtctatctgtcaaatggattaaatccgtagaattatagacctcgacaatcttattctcatttataatatccatcatattatgacaaattcgactaattgcttttactctttttttgtttgatgacaactcaaaaaagaaacggtcttgataaccagacttaatgaattgcttgcaaaaaaaatcctctatggtatttcctttattcatatccaatttttttgaagaataatgcccggcggataatcgactgttagggagattgatccgcttgttatcgtcagtattttcgtttatcgaatttcctatctaacaaattatattctgatgtttcttgactttgtagatattgagccatttcaatatcatctataataagtttttgagggttaagaaaccaatcattatctatataaatcgcatttttatcaatagccaaagatgcttccacttgtttcagaaacttatccatgaaaatattgaaagaagatgcgacaagatacacatgttctggttcatttgctgaatagtaacctatgtaatgattaccagaactatccttttcatcaatatagccaaagttttcgccactgcttgttccgactataccccaaaaacgaaaagtcaataaacaatcggattgccataattctctcatattgtcataaacattcactcctaaagtgtgattctttaaccctaagaagcaataatctaatattgaagcaccatttgtcttcaataaaaattccacatattgtttatcaacctctcctgtgatttttccgatgtttcttaatatgacattggaattaaaatctcggtatagtttaatatatggagatatttgtgcaagttcttctatatatgtgattatggcatccattttacttcattattttactttgacgataatgtttggtggctaactaacctttataggaatgttcagccgcttgttataataagtttccaatatcaaagcctaattcttttaatacatttgtttgttctttttggtattccaaagttccactatggataaaatctttatttacaatatagctattggggaaatccttgtaatacctcattagaaagtctggtataatttcataagtattaaaacaaaataaaatcttaccggattttactaatctaataaactcctctttactttcacattgataaaggttcccatcttcatgaaaaactctacattgatcaagaaataatttcatgttgaaattagcaaaattagctaaatattgagggcgttgccaccgtgcaatatctgtacagtttggagatgatacgactttttcccatatacctcgttttataggaaaagagttacagctaaaatagagacgataatgggtttgagcaaatgtctcttcattcagttcgccttctaatgatgaaaaaacgccataacagtcgtttgtcaaaagtcttacataatacaattcaccacttcgaccattaattttataaattgcccccaactcatattttgccataatgctttgatttttatttattataatgggttgtaaatagcaactgttagggttgcttatttacttgttatccgcacattaattctcttcatcattgccataggctaattctatatcaataaactgaattaccaactgacatatttcgccgccttcgtctatgccccaataaaccggatacgtaccatctccgaaccctgattgaaaaatgggaatatgatactccgtccccggcacttgccaatttaaccagtctccgcctgcacgttgatattctggatggagataatagttttctttgaataatgcagcaaaatatccatcataaggattatcatcgggattatctttgcgccattgttcatcccagtcgcaataaatacggtggataatttcatcacatacacatcctaaaccagcatctacacaaaatccaaagtaatcaccctcttccaatgtttcaaggttttcattcccaactaatgcttcatagaatcgaacagcccgcttttcattgaagcgcaaacgtactgcggcataacggtcgcaatcctcgtcgtcagatttgattacacaaatttccgtttcatatttacccgcaggagcgttctgaaaatatggacgttcgtttctgtttgggagatataccaatggatctcgtaccaaaagatttccactcggcaaatcgcaagaaccgatattaatcgtcgttaacgattttcctgcaatttcttcttgctcaaaataagtattgaggtcaacggggcagacggttttttcttttaccgattcccattttttcatccagttgttttctaattctttcatattcctttttgatttttagttgcggataacgttatactatcagccgatttggctgttattttctttaagtatcagacctcgtcttcctccatcaacagatcgtccaacgggcttttgatattgcttttgaaagtgtcggctatgtggacatacctttccgttgtcttgatgttgttatgtcccataagctctttcacaatcttgatgtcggttccttgctccagcaagtgggtggcgaacgaatggcgcagcaggtgcggataaatccgtttcgtgattcccgcttcccgggccgctgccttcagccgtttcgacacgatactctcggtgaaaggttcgcccggtctgtgttcaaaaagccacactttcggtttgtatagtctgttatattccgtcagctttttcatcaacggttttgatagcagggtgtagcggtctttttttcctttaccctgccgcacccgtatcagggagcgggattcgttgatgtcgccgggtttcagttccagcagttcgctgatgcgcaatcctgcggaatagagtatggagaacatgcagaagaagcgcaggtctgtcaccgtcgcgtcgagtatcttctttatttcctccttgctcaacacgtcgggcagcgtcttctcccgtttggcacggttcaccttgtaacaccgccgttcctgaccgagaactttctcgtaatagaacttgatggcgttgatacgctggttttgctggcaggaggatatgtttttctcgtggatgagatacagcaggtagtcgtttatctcgccgggggtaaccgtttcaatcttacgcccctcgaaatgctgttggaaatcgcggaaataggaggtatatacccttacggtatggtcactgtaacgcacttgctgaagtttttccagatagccttccggcagtggcggccgtttgtcttcctctttacggggggcggtttccttgatggcagaatagtctataaacgccattttcacatagcggtcgaagaactcggcaagcacgaaatcttctgccggcagataagccctgccgccgacaagcagtacgttttcttccttcgacagcgacaagcggatgtcattgtcattaccgaaagtcacttcgacaaattctctcccgtttcttatcaccggagaaagtttgatcttggtttttggggtatatatttccatgcctcacgttttgtcggatattgaaacccgttttcgcaaatttataaaaaaacacgggttatccatgcgctttattgacatttaacaatagatcccgactacctgacaataaggtgaggagccacgaaaataccctctgccaaatccgtccttcccggcactccgtttctccgatttcctctgccctgcgccacaagcggccacttctgtgcccgatgcttccatagcctttccaactcttttacgttcagccggttccccttactttcgttcccgcatcgctattggtgctaactaaaaacactcgtaattatggacgaaaacgtaaagaacgacgctaaacaagtcatgctcgttcagaatgccgacgacggacgactgcaagccgttaccggcgtggatcgggacggcaatatccagaccgccgaccccacggatcagaatgtggcgagcctgctgaacgtgaacacgcaggattcagccctcgaagccttcttcaaaaagttcatggaacaggcccagaaccccgtccacacgggtatcttcgtcatgacggagaatgccctgaacaaacttatccgcatcgacttcgacccggagattctggaaaattaccgtatcgacccctccgaacggcttcagacgcaggagcagcggcagttcgagccgctggacgtcacgaagatagacctggcggatatggagaagaaaggtatccgcatggaggacatcgagccgcacctgaaagccatgtcttacggacataaatccaacgggctggtggagatgaaccccgaactggagaacgggatgcgtgtttccaccaaagggcgcgtgtcgctcgaagagcaggcggacggctcgctgcgcgtcgtgccgcattactggcaggaacggcccgacctcgacgcccccttccacggggtgctgctcgacgaggaggcgaaaacgaacctgatgaacacccgccacgccgggaaagtgatcgacctggagctggagccgggcaagctcacgccctgctacgtgtcgatagacaaatggacgaacacgctggaacccatgcccgtttcgttactcgaaaaacgtgcccgcatcaaggaggccgacctctcggaaggcaagcagatggatttctacggcggcggcaaggtgttgctcgaaggatataccacccgcgcgggttataagcgggatgcctatatccaaatcgacgcggccgaacgtaactattcctttacctacgacggtttggatcgcaaccgctacgcccaggagaacaaggagatttaccgtcagaaggccgccgagaaaaacggacggcaggaaactacggcctccgaacgacagcccacgctcacgattcaccggacaatcctcaaagcctccgtgcccaaagaggcttatgaccagtggacggaagcggtgaatgatccctccaagcgggcggatgtcaaggctttctacatcaagggcatggtcaaggacgggcagggtgagccgttcaacgcctgggtcaagcccaacttcgagcgtaacaagatggacttcttccgctggaatcccgaccgtgcgaaacggcagggagcggaggtcaaacccgccgttgaaagccgtacccaggtcgccgtcaattccgagggcaagaccgtcgaagcggtcaaaggtgtgaaagagccgctcaagcagggacagcaggaagccaccccgacgcagaagaaaaattaccgcagcagcaaaaagagcaactccaaaggtgtcaaggtataacgtatgaaatggttctacatgcaggccggagccatgccgctcctgatcgcggcgctggccgccttgtacctccggccgggtaaacgcagccccccggaggaggcggacgacggacggcagtattacgacgggaacggcaaccatgtctattacgaccgccggctgatcgcccgtccggaaaaagagaaagaagaagaactacaagaaaacaaccactgaaaaatccgaatcatcatgcaagtaattatcgcagaaaagccctcggtggcgcgtgagatcgccgccatcgtgggagccacgaaccgtaaagacggttttatcgagggaaacggctacgccgtaacctgggccttcggccacctggtcgggctggcaatgccccaacagtacggcatcgcgggtttccgccgggaaaacctgcctatcctgccatcatcgttcatcctcctgccccggcaggttcgggagggtaaagagtataaggccgacccgggtgtcgtgaagcagctcggtattctccgggaattgttcggcatggccgagcgcatcatcgtcgcgaccgacgcggggcgtgaaggggagctgatcttccgctacatctactcttacctggaatgccgcacccctttcgtgcggttatggatcagcagcctgaccgaccgggccatccgcgaggggttacaacacctccgccccggcaacgaatacgacaacctttacctctcggccaaagcccgcagcgaagccgactggatcgtcggtatcaacgcctcgcaagcgcttgccgtggctgccgggcggggcgtctggtcgctcggacgggtgcagacccccacgctggcgatcatctgctcccgttacctggagaacaaggcgttcaagcccgccacctatttccggctgaagctctccacggcaaaggagggcacggagttcaccgtcctctccacggagaaattcgacggcagggagaaggcggaagcagcccgcgccgaggttatcggcgtccgaacggtacgcgtcgtgaacgtggagcgcaaggaggccagggaacagccgcctctcttgtacgacctgacgacactccaaaaagaggccaacagccggtatggtttttcggcagaaaaaacgctcgacatcgcccagtcgctttacgagaagaagttcatcacttatccccgtaccggctcacgctatatatcggaagatgtggccgaggagattccggcactcatcgggaacatgacacgctatccccgtttcgcggaatacgcgggcaggatggataccgcatctctctcccgccgaagcgtggacaacgaaaagatcgccgaccaccacgcgctgcttcccaccgagaacctcccctccgaactggatgccgaccaccgcatcgtctatgagatggtcgcggggcggatgctcgaaaccttttccggggcctgcgtgaaagaaaacactttccttaccctgcaaagcgcgggacatgatttcacggcccgcggcagtatcatggtcgagacgggctggcgggccgtcctgaatgaacctgtcgaagagaaagaggaggacatgaccctccttcccgacatcgtgcaaggcgacgagctgcccgtcaaaggatgcggcacggaacagaaacagacccggccgcgcccccttcacacggaatcgagcctgctggcggcgatggaaaccgccggacgcgaactgtccgacgaggccgaacgcgaggcgatgaaagatgccggcatcggcacgcccgccacccgtgccgccatcatcgaaacgctctttgcccgcgagtatgtcaggcgagagaaaaagtcgcttgtacccacggacaagggactggccgtgtatgccgtggtcagggacaagaagattgccgatgtcgccatgacgggcggctgggaactggccctctcgaagatcgccaccggggagatggacgccccgacgttccatcgcggtatcgaggtcttcacctcgcaaatcgccaaagaactgctggaagcaagaatcgacggcgcggagagtgacacagcctgcccgcgttgcggcaggcccgtggtgttctatcccaaactcgccaagtgtcagaatcccgattgcggcctgaccgtatggagaaccgtgggccgcaaggagctgaccgacaagcagctcgcggaactgctgaccaaaggcaaaaccggcacgatccggggattcgtcaaaaacggcggcggaacgttcgacgcggccctcacgctcgatgaccagttcaagacctcgttcgttttcgaaccgcgcgatactcccaggcagggaaagaggaacaaacggaaataatcgttacctttgccactggaaaagacctgtcataacgagatacgcttgtttgataaggattttttcagtggtcggcgcttcgggtgggaacccggggcgcctttctcttccccgattatcaacgaccactaaaaattcttatcatgccagacaagcaacaccatacccccacgggggaattgtcctattacggactttcgttactatcctacctcaaggacagccacccggaactcatcgccgaaagtgagttcatcgccgagcgggccgacagcgccgcccaagcgtacagcgaggcgatccgttcgggctgcaaccacatcgaggccgaagaaattgcccgcgaggaactctgccgcggactgcacttttcaccctacaacacgctggtaaacatcctctggagggaattcgaggcggagattcccgaggataccgcccggcaggcggctctacgcctgctgcccctctgccgcggggtgctggagaagtacgacctcacggacgacttcgccgacacgcccgactacgaactgttctataccgaactgacgggaaccgtccaaatacttctcgaagatggcattcaataagaaaacccacctccgccagaatatcgacgcgctgaagacggccttcacgctcgacagggaacggcgggcgccgactcccgaagaagaaaggacactcggcgcatacagcggcttcggcgccatcaaggaagtgctggaaaaccccaccgggaaaccggacaaggacggcatggcaacgctcgtggccgagttgcacgaggtcatcagggcgaacacccccgacgaacgggaatacaagcgctacatggacgggatcaagaactccgtcctgacggctttttacacgcccccgaaagtggcagacgccatcgtggaggcgatatgggacacgcggatcgtccccaaacgtattcttgaccccagtgcgggaacgggggttttcgtcagtgccgtggatttccacgccccctatgcggagatcacctgcttcgagaaagaccccgccacggggttgatcctgaagcacctgcaccccgaaaaacgggtgcgggtacagggattcgagcgcatcgaacccaaatacgccggttactacgacgtggccgtgagcaacatccctttcggggacgtggcgctcttcgacccgttcttctccacccataccgaccccgtgcggcggcaaggcacacgggcgctgcacaactattttttcatgaagtccgtcgatatggtacgcgagggcggcctggtggcattcatcacctcgcagggagtattgaacgccgagcagggacgccccgtgcgcgagtggctgatgaaccgctgcgagcccgtatcggccatccggctgccgaacaacctctttacagaacacgcggggacggaggtcggcagcgacctggttatcctgcaaaagaaagccgccacgggggaactgtccgaacggcagcgggatttcatcgaatcccgcaagctgtcgaacggcatccggataaacaaccttttccagtcgttcgacagggtgatccataccgaggccaaagtaggcaaagacccctacggcaaaccggcgatggagttcacccacgcggagggcgtggacggcatcgaccgggagatgcggcgtatgctctcggaggatttcaaccggcatttcaacgagagttattgcctggaacatgctccggaacagacacccggtacaccggagcgggaattgtcccgtccccgtcaggcggaacgccagcgtgccgaaagacacgagccccgccttgccggagaaatcgtcaaggagattatcgccgatgcccgtaaccttcagcagcagcgggaagaggaggaaaaacgccgcgtcgtcgccgaaatggcggcacagggctaccatgtcgataccgaaaccggggagattacccgaatcgaaaacaaacccggacaagtgttaccggattctgctgccacacccgccggagaaccgaccggggaggatctggccgacttcggggcctggtcgaaagagcgggagaatcgcttgtgggagcagcacccgccgaaacccgaagatttcggcatggcagatactcccgtgcagcacgtgggcggaataacggaaccgaaaccgcgggagggcttcgccgggtcgcttttcgacacggtggaaacggcggctcccgtacctgccacccaagctgccgaaccggtaaatgtgcagcaggaaccgttgctgacgctctacgatctgttcggcttcagcgccgaggagcggcggcaggcagaactcggtatatccaagaaaaggaacagccgccggggagcaaagcggaagacgccccgacaaccctcattattcgccccggcctcctctccggaggaacagaagagcgaaatgccgaaaacgacgccaccggagcgtgatcccgaagacttgtatgcctccctgaactgggaggacaacccgccgatcaacggcttttacgagatgatgatgtcgcttaccccggaacggagggcggaattgcgccgacaaagcgcccggcagcaggaaaccccggaacagcgggaacggcaggcggtacgccccccgacggaagccccgaaaggcaaacggaaacaagccgccggtacgccgagaacgggcggcctgttcgacacgccggacaatccagaggaggaagaacccggtaaagaaatgccgcagatacgggaggcggatatgaaaccccgaccgttcgagggggaggtcgccccctatttccgcgagggaacactcgtcacggacggacaaaaccgggtcggctacctgcgggagactgaatccctgcaacccatgttccacccgctggaactcacgcctgcacaacggacgaaagcctccatgtatatcgagatacgcgatgcctattaccacctttataacaacgaggcggaaacgctgacggcgaaccccgccctgcgggagatgctcaaccggctttacgacaatttcaccgaacgcttcggacggctcaatgacaaacgcaacctcgacctgatcaagatggacgcgcgggggacggagattctatcgctggagcgttacatcgacggcaaggcacgcaaagccgacatcttcgagcgtcccgtggccttcaatcccgatgagatcacgcacgccgacgacgcttcggaggcccttgtggccagcctgaacaagtacggccgggtggaaccgcactacatggcctcgctcacgggaactaccgtggagggaatactcggggaactgaaaggacgtatctattacaacccggaaacggacggctacgaggttgccgacaagttcatcgccggcaatgtcatcgggaaagccgaacggatcgaggcgttcctgcgggagaatcccgaccacgccccggcccgggaatcgctggaggctctgcgcgaggcgacgcccaaacccatcgctttcgacgacctggatttcaacctgggcgaacggtggattccaaaaggtgtttacgagcgtttcgcctcctcgctcttcgatacggaggtgaagatcaccttcgcctccaacctagacgagtacggcgtgaaggcggaagcgacgaacgtgaagatcacggagcagtatgccgtcagcgcgcagacccgtaagtacaacggcctgcaccttttgaaacacgccctgcaaaacacttcgcccgacatcaccaagaccgtcctcaaatgggtggacggagaacggcgggaggtcaaagtgcgtgacggggaggccatacagctcgccaacagcaagatagatgagatccggggtgctttccccgaatggctgcgcgagcagtcgtccgacttcaaagaccgcctgacagacctctataaccgtactttcaactgttacgtgcgcccgaagtacgacgggacgcaccaggaattccccgacctcgacctcaaggggctgggaatcgacaaactgtatgacagccagaaggacgcgatatggatggacaaactgctcggcggcgggataatcgaccacgaggtgggcggcggaaagacccttatcatgtgctgcggggcctacgagaagaaacgcctcgggctggccaataaacccatgattatcgggctgaaagccaacatccatgaaatagcccggacgttctgcaccgcttacccgatggccaaagtcctctacccgggcaaggaggatttcacgccccggaagcgtgagcgcatcttccgggagatacgcaacaacgactgggacgtcgtgatcctctcgcacgaacagttcggcatgataccccagtccccggagatacagcaggagatattgcaggccgagctggactgtgtggaggagaacctcgaagtgctcaaagcacaaggcagggacgtttcccgcgccatgatgaaagggtgtcagaaacgcaaggccaacctggaagccaagttgcagaaggtggcgcacgcgctggaaacacgcaaggacgacgccgtggacttccgcctcatgggtatcgaccacctctacgtggacgagagccacaaattcaagaacctgactttcacgacccggcatgaccgggtggcgggcctcggaaatcccgaggggtcgcagcgggcgctcaacatgcttttcgcgctgcgtaccatacagcagcgcacgggccgcgacctgggggcgacgttcctctcgggaacgaccatctccaactcgctcacggaactgtacctgcttttcaagtacctgcgcccgaaggaactggagcgtcagaatatccgcaccttcgatgcctgggcggccatatttgccaagaaaaccatcgactacgagttttccgtgaccaacgaggtcgtgcagaaagaacggttccgatatttcatcaaggttcccgaactggccatgttctactccgagattacagattaccgctcggcggaggatatagggatcgaccgaccgcaaaagaacgagatattgcacaatatcccgccgacaccccagcagacggagttcatagaacggctggtgcagttcgccaaatcgggcgatgccacgctcctgggccgcctgccgctctcggagcgggaggaaaaggcgaaaatgctcattgccacagactacgcccgcaagatgtcgctcgatatgcgtatgatagaccccgaactatacagcgaccacgtggacaacaaggcgagccactgcgcccgtatgattgccggttactaccgccgtttcgaggcgtacaaaggtacgcagttcgtattctccgacctgggaacctacaaacccggagcggggtggaacgtctattccgagatacggcgtaaactcgcggaggattacggcataccccaaagcgaggtgcggttcatccaggaggcgacctcggaaaaagcgcgcaaggagatgatcgccggtatgaacgccggaaaaatccgcgtactcttcggatcgaccgagatgctcgggacgggagtgaacgcgcagaaacgctgcgtggcgatacaccacctggactgcccctgggtgcgacatgaagtcgcatagataattgttggaatgatacttacgggtatcagctttaacccgctgttccgtcagcggtagcctaccaccgatgcaccttaatagttgtattaagcggttgggacaaagtacactttcgcaagacaagacagaaccgtgaggggaagtcaagtacggttagtatcataccgtagagtggcgaggcaggatagtatggttagcgcaagcgaactgttagtaaacttcgtaatgtcacgaaagagtgtaagatactggtacactctacccaaaagggaagcggtcggttaatcctttccatggtaggattacacggatataagcaccgccggaggatgagacagaacctaacctatccgttagttatctatgtggaacatggtaagcctgtatatctcctgccatgtaaaaatggcaggtaagctgacagcaatgaaagccgaatggtgtgcaggtataagataacagaaaaagcgaatgccgttctgtaatggaacggatacggattgaaccgacatcacgggctgatgtaggcgacatcatccgacacgaaagtgggcagacttctgtggcgacactcggtaggcaaaacaaaccgaatgttgccaaatggtgattctttacaatagacttttagaacttttttaaagtaggaatgcaaatgaacgataaaatcaaagaaaaactcctcgaccaatcgtgtgcaccgactgataacttgcaaacgaattgggacaggatagactggaccaaagcggagcaggctgttaagaagcttcaagctcgcattgtaaaggctcagaaggaaggcagaacgggcaaggtgaaagccttgcagtggacgctgacccactctttttacgcaaaagccttagccgtaaagagagttacttctaacggaggtggtagcacccccggggtggacatggaaacatgggagaaacccgaagcaaaaacacaagcgataagtgagctcaaacgcagaggctacctgccgaagccattgagaagagtccacatcaaaaagagtaatggcaaactgcgaccgttgggaataccgacaatgaaagacagagccatgcaagcactttacctcatggcattggaaccagtgtcggaaacaacagccgacacacgttcgtacggtttccgcaaggaacgtcgctgtatggatgcggtacagcaatgtcataacattctccggaaaggctattctcccgaatggattttggagggtgacataaaggggtgcttcgaccatatcagccatgaatggttgcttgccaacatccctatggacaaagcaatactccgaaaatggttgaaatgcggctatatcttcaacaaacagatgttcccgacagaggagggaacgccacaaggtggcattatctctcccacgcttgccaatatgacattggacggattgcagaaagtccttgcagagaaatataaacgagttagaataaaaggcaagttatattcgccaatggtgaatcttgtccgctatgctgatgactttataattacctgcgagaaccgtgaaacacttgaaaaagaaatcaagccattggtagccgactttatgtctgaaagaggtttgaccttatccgaagaaaagacggtgataaccaacattcgtgacggtttcgatttcctcggtttcaatattcgcaaatacggcaatgaaatattgacaaagccgaccaagaaagccgaaaaacgctttatggaaaatatccgtaaggttacaaaaggtcataagggttgcaagcaggaatcattaatcagaatgttgaatgctaaaatccgaggatggggagcatattatcagcatggggcgacacgtgattcttttcacagaatcgaccatcagatatttctcgccttgtggcaatgggctaaacgccgccattccaagaaaggaaaacggtggataaaagaccgttattggcacaatatccgagggaacagctggacttttgcggctaagttcaagaaatcaaacggcaaggaagaccaactcactttgctgaaactggcatcttcgtttcctttcctgcaatatacgcagataaaaggggatatgaatccgtttgacgcagactgccgcctgtacttcaataaaagaatgaagtcaaagatgcttgtgacactgaaaggacgtaagtccctgctttacctatgggaaaagcaagggcggaaatgtccgatatgtggtgaaccgattgacacgtataaggcatggaacgtaatgccaaccgtccaagacggacggaaatgcaatctgttggttcatgatgaatgtttcaaattatcccgtaaaaacaatggaaacaagaagtaggatgagccggtctctgcacacgaacagagactttgaaaagcttgagccgtatgaggggaaaccctcacgtacggttctgaggggggaagagggcagtaatgcccttgacctacccgatcgtcccagcgacctggagcagcgcgacgggcggggaatacgcaccgggaacgagatcgccaaactccatgccgacaacaaggtggacgtgatattatacgccgtcgagaagtcgctcgacgcctacaagttcgggctgttgcacaacaagcaactgttcatccgccagctcaagaccaacaacatgggaagccgtaccatcgacgagggggccatcgacgagaaaagcggcatgaatttttccgagtatgtagccgtcctctcgggaaatacagacctgctggacaaggcccgcctggagaagaagatcgccacgctcgaaagcgaacgccaggcattcgtgcgcggcaaatcatcgagccgctacaagctggagcagatcacggagaagatagagaagaacaacgacctgatacggcgtatcggcaaggatctggaacacttcaaggcccgcgtcgagttcaacgaggacggctcgtaccgcaatcccgtgaaactgaacgggctggaaacctccgaccccaagctcatcgggaaacagctcaaccgtatcgccgaaacggcacgcacgctcgacaggctcgaacccatcgggagcctctacgggttcgaactgctcgtccagagcgaaacgaccgggaaagacgggctcgacctggtgcagaaccgtttttatgtccggggtgaaggggattatctataccagtataactacgggaatatcgcctccgacccgcgactggcggcgatgaacttcatccacgcgctcgcgaccatcgagccgacactggaaaaattccggaaaaagaacgaggaactggagaaagatattcccgtcctgcgggaagtggtggaaagttcctggcgcaaggagcccgaactgacggccctgaaagctgacctgacggaaatagaccgcaggatacagcaaagcctcaaaccgatagaagagagcgagggaaaggaggcggaggaggataacgacgtgtgccgggaacggcatgacacggcggaagagctcccgaaggaagacaacacggcggcccgtattccttcccggctgcggcagattgccgacgcctccggggggcgcatcgtgatcgcgggcgtgggcagcccgccggagaacggccccgcaaagaaagggattaagatgtaagcgaaaagccgacggaagtacagatttccgtcggcttttttcatatgcccatgagcgttgttgtcacacttcctgcaagagtgtttgcagctcctcctgcgtgggaagataggtcatgtactgggcggcgaagacctgcttttcatcttcgggcagcgtataacggacgaccgcgtcgtttttctccgcgcagaggacgatacccaccggagggttatccccgggattcatcaactcacgggtgtagtaattgacatacatctgcatctgccccaaatcctgatgggtcagctccccggatttaaggtctattaaaacgaaacagcgggccaggtaattgtaaaagaccaggtcgatgtagaaatgcttgtcgtcgaaggagatacgcttctgtcgcgcgacgaaggcgaagcctttcccgagttcgagcatcaagcgctgcaagcggctgatgagcagttgctccagatcggtttccagaaaatgctctccctgggggataccgagaaactccaggatatacgggtcgcggatgatctctttgggttcgacacgcccgggttcggtacgggaaatctcctctttcacggctttcttgtctcggctggccagcaggcggtcatagaaaagcgtgttgatttggcggtcgagctgccggacactccagttttccttgacgcactcgtgcaggtaaaaatcacgggcggcatcgcccgacaccttgagaagcgtgcggcaatgcgaccagctcaatttatcacacagcgtgtgatatttcgggtagcactggtaaaactgcctcatgtaccgcaggttggtggccgtgaacccgtttccgaactccgccacgagccgcctggaaagggtgttgatgacagccttgccatatccggcacggccggttccctgctgctcgtactccactatatatttccctacctgccagtaagccctcacgagggtcgaattgacatgatgtatcaccttcgcgcgcgcttcctgcaagatatggcgcacgttatgcagtagctcttcctcccctttgtcggcaggatatattttatctgtttctttcattgttcattattatataggcttccaagtgcaaacatactgattttacggcaaatatcgaacggttgtaccgccttgtcgtgccttattccatgtatctccgcgtttttccatgacgccggactctcgggacagggcctaaccggaaccggcaggacgatcctttttcagcttgcggaaattactgaagttacgctcgatgaaccgcaggacgtccgattcccggtagaaggtcttgtgatagatcatctcgtaaggcagctctcccgaggtgcggtaacgctggagtgtgcgcttgctgatattgagcatacggcacaggtcgtaattgtccagaagacgctccccgtcaggcaggatggaaagcggttgctccacatcccccgcgcacagcttctcaatacgttccagccgttccgagagccgctgcatccatccgtcgaaatattccttatccagaaacatggcctactcctttggtcggtttttgcgccgcacggaacgctccttcagcacacggcggatttccgtgagggaataatacagcttccggttgatggccgaataggtgatcacgtgatccgagcggaggcgttgaagggtacgcccgctgatgcccaggtaacggcagacctgctcgccgtccatccattcgtcgtttatatactccttattccatgcacgccccttttcagggagagaggcgattgcagcctctattttctctatacgcccgacaagctcgttataggctcgcgaaccgatcactatgattttcatactcctttgttttttagtctgttacaaaggtcgggcttatatggacagcttaaaacgaggtcggtacgacttttttttgataatttgcagtgaactgattctcaacggttcatgcggtgaagaaggcagtgttttttaccgaaatccgcggcccgtactcggtatttttattggcagaaatgcgatagcatactgtgattcaacgcttaacggtgttctaatccggacggggctacaacggaacacccgtatcggctccttatacgggtgcaaatacgggcgttcgggaaagttcctttcgagagttacgggggaaaaccgacctcggttcttttgttatatacaacgctgattatcagtgcttctataagaaatagagtgctttaccggttcatgttctactcggaattgccgtttttcttgtttcgcttccacgtctgcatacgtttaagcagggcctctttcgccttgtcaagccacggtgtcgggttgtttcggattttcatatcgcagaatgtcctcgaaaggttcatgtcgaggtgtacgttgaaagcgttggaaatgtagctggcaagttgcgtgagtggcacattgccgaaacagcctttactgtcgagcaggtaaataagttccgtcagatccgtcttcgagtcctgccatgtcggacgcacgtcaggcaatggcagaaccatgttccggaggttcgtgctctccagtgattccaattcgcccataagataaaccgacaacatatcgttggccaggattttcgccaccttgaaatccgcgtttgtcgaaaactgcgggtcgagttcatagtagaaggtttccaggtattgctccgtgtcggtctgcccgcgcaggaaatagaggctgtccaggtgtgtagcgccgctgcggaaatagcggataaagtcgaggcgtttctgcgtgtacgcgttgatggcccgaacatgggcgtccaggtactcccgttgtgcctcgatacttcctaccggacggttcatctcgatattgtagagcttgcggtaatagatcagacggcaaaaaagacggggtttgatttctttgaagaactttatttcctcgtcatcgttttgaaaacggtagccgatgatatattgtttcaaacggtcgaacgcttctcccaggacacgtgacgcttcaagcgactttttcaacacgtcggtatcccgcgattcgatacgttcgatactccgcaggacttcgctgtttaatttttctataaatgcaatcataatccgtcttgttactttcgcgtataaagttagcgaatcgaaaaaccggcggattacgatttttatctttctcttcgtttttttatcacggagccgattttaatgtcagatccgaccttcctggcggatggaagtgggattgctccccatattccgcttgcaaaagtccgtaaagtgggattgggcggagaaaccgcacatgtaggctatttcctgcaacgtgtagtgtgtcgtccgcaacaactccccgatacgttcgatacggcgctgacgtaaccacgaggaggccgagcagccgaaaacccgctggaaacgccggcggaaggtaatcgtgctggaatacccgcaaaccccggcgagttccgtgacgttatccgaggcaagataattcgatttgacacgggagatgaactcgtaatcgtcccccaggtgcaacagctcctcgaactccccgacatcggcgggagtgagatgttcataagaggcgtcgagcattttcagcatgacagcagcgttacattcaacgggcatacccaatgtcttacgggcttcacgcaggtaattcttgaaccgcagccgcagcgtgtcgtgatgcgggtaggaacactcggacagaatggtgcaaaccgtccgcagttcatcgacacaacagtagccgaaataccacgttacaagacgctcgacgtaatggacgacatgaaattcctccgaaagcatcagaagaagcaggaacggggtgaaatcctggtattccctcgttatgggacggggtgcttcgtcaagcaaggaggcgatgtcccgcatcagcagagaatctcccgagtacgcttttatttgttcggaactgcgggcataatcccggtaacgcgatatgaccgccgacaaagcattgaacttcacggcgtgaacgccttctataaaggaagggcgaagactgttgtaaatggataagtcggtttgcataagtcatttctataaaacggagccgcatccccttgttgccaaaactccgcaagtcgttacttatgaaccgcttggaacacggtacgaatcctaattacaaatatatcgcatctgataatccggaacaaatatcagcaggtaaaaatgaaaataaacctcgttatttttgattattacctgcaataatattatatttgcaaacaaataagagttgtttgacagcatgagaaatatagtgtatcaaagcactttaccaatttcttatccgttgcccattctcatgcgagtttcttttaatctatttgtagtcaattaaataccttcagactacatcaaatatagcaaaaataacccactatccaatagggttacaactcttcaataaaatggttaggatgttcctcccaatatttttggtatatccaatcctgcccttttgtaaagttcagttgatacattctgaatgcgaccaaaaaattcttaggttgccacaattcctcatacgtgtagcagtatttcataccgcaagcctgcattacattaccgcttcttggattgttcctgtcatgtgtggcagtaatgtacggtaatccatctttctttacttgttcgacaacagccttgccagcctccgaagcgatacctctgtgccaaaattctttacggagcccataaccaaaatcatggtgctcttccatatcaactttaacatatcctattggaaaattgtcgtctttcagacaaatggcataagcgtatgcttgaggttgttcatatttggctgcatacctttccgcatagaattttttggtttcttcgatatcttttagagaataccaaggaaggaacttattgacttctttgtctttcaaaataaggaaaagagcctctatatcgttttccagaaatttccttagaatcaatctgtcagtttttattgtgggggtattcatattataagctgcattcaaataaaaacatttcacatcgatcgttaatggctatttccttgtcaaaagaagaataagttttgacttgagtaaacccgacttctttcaaatattcttccatttcaccatacttataaaggtgcgtctggaaatccataaattcgctttgaatcaatttcgtatcactatacatttcataaattccgggagagagctgggtctgactttgttcatcgtaatggttcttcgactttaacaccagttcaaaattctcctttgtctttacagaaaccgcaatcgcataatcattgtcatctgtacatctattggcgattgtatcaacagcaaatacaaacttacccattggagacaaccattcttttattctgcacaagatttgtttacacaaatcagtatcggtaaataatgacacagagcccgagctgataaatatataatcaaacttctctcttggagaatattttataatatcagcttgaacgacttttgcctcaggcaatttctgttttaacttttgtaacatttcattggataagtctatgccacttatatcaagccctctttccacgaatggaacaagaaaacgtccactgccgcataaaggttctaaaatcttttttcctttttcagcataagaaagataaaaattcaattcgtcttgcggtgcttctgcatgcaagatttcgtacatctctgtacaaaggtttccgtaatagttcttctcttcaatcatcttatgtaaagatgttattttcaattatttaattctgtaagattaatcactttgttttcatatagtgtttatatctcttttgcttttcattcttcatattcgatgtaaaattagcaaaaataccgcacattagccgtttatgaacagcactttttattgtactttaatgtaatgaaggaattacagttttatcccctttcctttcctttgcggctgcatggggcgatgtatattctgccttagcttgtcgaattgctttttaaatcattcggttatgggctttcggtcgatggcaagaaccagtttcgtcccgtccgtgggggctttcagcacttgaaaccctgccttttcggtcgtgaatttccgtttgtgttcctccgagtagagttcccctgcatactccaacggttttcccttgacgagcgttgcgatctgcccgtcgctgaacccgacaaggcggcataggttttcaatacggagcatttcacggaaatagggaaaccatgccgccgcccttgcgattaccgttttcagaaacgatatttcctgcttgtgcctcgcttccttgtccgctatctccctgcggtgcttccgctctacttccgccatttgtcggttgtggtctgcctgcatggtctgtattcgggtttgcagggcttcgatggcttccccgtgcgtggccacctccctatgcagggcggtgttctccctctccagcgtcttgaccttgttactaccgaaaagataaccgacactttcggcgatgttggcggctgcggtggtctctgcctctttcagcttctcggtctgtatctcttttttcgcccgtttgagttcctcctgcgccgtttctttctgacgctgcaaatccacgacctccgctttgaggctgtcggcgagtttcttcgtttcattgtaatactgctgcgtggacttgtgccgtgccttcgagccgtctatgcctctttgcagcccgtatttcgccatcgcttcggcataggtatcttggtaggactttaatttcagtcgtgtcataatatcgtctgcgcacagtcttacggtgtcggtcggcttcttgcggtatcgcttctttgtctgttcctcccgtttgcggcgtttgcgctctcccttgacgatggggacgagcgtgacgtgtatgtggggcgtttcctcgtccctatgcaggtgcgccgccacgatgttctcctttccgaacgtgtcggtgaagtatttcatattgtcggcgcaccactcgtccaaacgcccctccctttcgatgcgttccatgtcctcgtgcgttcccgacacggtaatgcggattgcccgtacttggttgtttccgattttgcgtgtcagtcccgtttcttccaatcttctctgtatagctgccgaacggtctttaatcccgtcggggtacgcaacgagttttcggttcaggtgcgtccgtgtcgggtctgcgttcttcgggatgatgaaatactcgatgtgggcggtcgttccgctgtcgctgccgtgcgccttttccatgtgcaatactacgaaacccatatatattcctttcttttttagcttgtgaaacaatgattcttcgtatcttcgggggcggcaaatagccgtccccgatggggtgtgcagaggggcttgccccttgccttattggggaattttcagcgatacggagtattgcggctcggaaaattccctaataagctacggtattttctccgtaaataccctgcggcgtgtcggcggtctttcggcggtagctctccctgccgcctgcttacccgtataaccccaccttattatttccccctttcggtcgggaaacagcccctttccgtccgtgcgacggtatgaccgtatgaatgtatgacggactgataccccgaccgacagaccgttacgccatccatcggcggctcggctcggtgtcggcaacgacagatacgataaccgtcgttttctcttttcgctggtgcgttattctctccaacaacactttgcggactttcgtcgccccgaacgattcgatacggaaagcgaggacggctatcgtttcgaggtcgtaaacctctatgctgctcctatctcaaaactccgctcttgcagagtgcctttatacttgcccgaaccgtcggggcgacaatcccgaacagttcgcagatttcccactcggtcatggcggttgcgcctatgtcggtcggcagggagatattgccgtattctgttcctttcttctttcatcggtatgctgttttaaggtgactaaatggctcggcagatgttcttctccatctcctccagcttgtacgataaggtttccatgtcttggcttatcttctggacggtgattttggcgtaaattggggtggttttgatgttcgtgtgccccaataggcggctcacggtttcgatgggtacgccgtgcgacagaagtacggtcgtggcgttcgtgtgtcgggctacatgataggtcagccgcaccttgaagccgcattgtctgcctatctctttgagtgtcttgttataactgccgttgctcggaacgggaaacacacaaccgtcctttgtcagtcccctatacttctcgatgatgcgtttgggaacgtccaaaagacggatattcgattcggtgttggttttcttccgtcgggtgatgatccataggttgccgtcgaagaatgtttgcaggcggtcggcggtgagggttctttacgtccgagtacgccaaacccgtgaaaacagaaaagacgaacaagtcccgtacaagttcatggtaggtgttcttcatcagtgcgtccatgagcgtctgtatctccttttgggtaaggtagcctctattgacgctttcgggcgagttgatgtaccctgcaaaggattgaacggcagacgcccgtcgttcctcgctatggaaacgatgtgtttcagcacgatcatgtagccccacacggtattggtgcggcatttcttcttcgtgcgcaggaaatactcgaagtcgttgatgaatgtgaggttgagttcctttagcggaatatcctcacgcttgtaggtatggggcagaaattcccgaatatggctgcaaaccgtctgatagcatcggaatgtcccctgcccctgctgtgcccgactttcttggcgaactcggcgttgtgctgctcgaagagtttcagtaaggtttcctgcttgacgccgataccgagataggcgtctttcaacttggcggcggtaacatacccgtccgtttgcatcagttcttggtagtggtggtttacctccactcggattttatccaccgcaaggttgattctctgcgcttcgacgctcttgcccgaagcacggcccgttttcacgtcccacaaccgcaggggaacgtccatcttgtaactgaactgtttaatctctccgtccaccgtaaggtggcacatctaaggcaggtggccgttgggtttttcgctgcctttcttcacgtaaaataagaccttgaatgtacttcgcataactcactcctttttttggttacaaaattagtttatagtgagttaccgacagctatgcaaatcaacacaaaacgcagtaaaagaacctcttagcaagaaatatgcacccgttacgggggtaatgaggtggtaactgaacttctgcaccgtttggcttcgaggtggcattccgttggctctacctaatagaaaaacaaagcgtaacgaacgctttttcagctaattcgctacgctttgcccaaatttgcaaatccgctatgtgtttattttaagtctactacagtaatacctgccccaccaaattgtacgtgttcgtcttgatagtgtgctactcctggaacacttcccaaatagctgcgaatcagggtgcgtagtatgcctgtacctgttccgtgaaggatacgtacacggtctattcccaatagtatggcatcatcgataaaataagttactgcctgtatagcttcatcgccacgcataccgcgtacatcaatatcttgtttgaaatttagtttcttttcatatacccgatcttgtgtttcactgctgacgaaggtactttttaccattgttttctgggtgggctgtattggtgtgctacgttccagcttatccagttttacattggtttttatcattccgaacataactattgcatttttgccattaattcctagtacttctccgacactggattgacctttgatctttacagtactacctacagtgataggctgttctttgggtattgacagttgggaagattccgccttggctttatcctttttgttttttttccgctcttgtttttcacggagtttttccattttccggatgatttcatcttccttgttctttttctcgatatcttctatctgatttttaaaatcagtcagttcctgacgtgccgattgtgtacgttctttgtcggcttgtgcttccttgatgatacggatggtattttcaattcgggcatttgattcctgtaacaatttttccgcatcttctttggcctttcgcaaaatctctttacgacttttctccagttcctgtagttcttcttcgtatttggcgatggtttcttccatctgtttttctcgtttgcggatgttctgacgcttggtttcccaataacgtttgtcacgtacgatatcttgtagatatttatcagcattgatatattcactccctacaatttcggatgcgtcggctattacttcttccggtaaacctattttcctagctatttctactgcaaatgaacttcccggatttcctatttgtaattggaataaagcttgcattaaatgcctgtcatataacatggcgccattaaccactccttcgtgatcttcggcaaaatgtttcaaattttgataatgagtagtgataacgccgaatgtgcccttttcattgaaacgtttcaacacagcttcagctatggctcctccaatttgtggttctgtacctccgccgaattcatcaatgaggataaggctgcgttcgttacagcttttcatcattgttttcatgttggtaaggtgtgaggagtaggtactcagatcgtcttcgatactttgttcgtcacctatgtctataaagatactgccgaataatccggcatggctacgttcatgcatcggaaccggcataccacattgtaacatatattgtagtaatcccacagtcttcagacaaacggatttacctccggcattcggtccggatataattaggatacgttgattttgagttagttctatatctagaggaacaacctttttattatgcttggccagcgagagttgtaatagtgggtgtatggccatggtccaatccaaaatctgtttgtcttccaatgatggtttggtggcgttcgtctgaattgaaaaatgggctttggcacggataaaatcaatttctgccaaaaactcgtatgactggaggatggcggggacctgtggacggactatgatagagaaatctgtcaggatacggatgatttcccggcgttcttctccttccaattcccgtattctattgtttgcttccactacttcggccggttctatgaaaactgttttgccagtggatgattcatcgtgtacaattcccttgattttccgttttaatcccggtgcgacagggatgacgagtcttccgtcacgcatggtaggagttacatctttatcaacataaccttctgcttgagcgttgcgtagaattgcattcaaactgcgtgatatgcttccggctgtcgaggccaactctctgcggatgcgtaataattcggaagaagcgttgtctttgatttttccgaatttgtctaagatgttgttaatacgcgtaatgagttgaggaaacacgataatatctcctgccagtttttgtagggcagggtagggggagttttctttttcttgttcttcgtcattcggggtcagtgtcagaaaatggatgatatcacgaattgtttctaaagaacggcgtaaatcaaacagttcttgctcatccaaatacataccttctacgcggatacgttttagtgatgggcgtacatcaaaaaaatattggtcgggaaaactgtcttcctcttgtatgatgcgtatgaattccatcacctgttccagccattcattaatatccttaaaggattctgagaagttcatttcatctactctttcttgacctaatgtgctgagacatttctcttttagtaaatgacggatggaatcgaaacctattttctgttcgaaattctgagggtatatcatgatttatttctttcgtttattattcgtatgcaaaaatacgatttgaaaattttatagcaaaaaaactggtaaactatttgcttatttaaaataaagtcgtacctttgcaacgctttcaacggaaagcacttctgaaaagaagtcttggagaggtggcagagtggtcgattgcggcggtcttgaaaaccgttgtactgcgaggtacccggggttcgaatccctgtctctccgcaataagtattgaaaatcaatgagttataataaaaacacccaatcttacatatagaaagattgggtgtttttattattttatctaagtatatccagactcacctgcaacggactttagcttttataaagatcattttgttctctgatcaatttcggaaagtgtccttgacgtattatctttctcactagaaagttcgggggtatttatgccctcatgccctcactgcatgtataataggttaattataaatgacttatatgacaatagtaaaaatatttgctttcacttatactctcatgccctcactatgttttgaggttgatttttacataatatgcttgctgtcagctatatattctctttttatagaccgttccagcttggtataaagtagagcgttttcaagcttttttctcgtaagaatgcgcatgaaggggggagacacttccacggaatgatagcttacgaattcccggcagcgataaaaaaagagcaagacattttaaaaaaaactcttgttctttaaaaaaaaggcggttatctttcttgaaaagctcttgatctttttaaaaaacgtccttgtctttgatatggaatttcattctggactaaagcgttttacatacatacgcataagcttgtacgtatgtatagccccgtgtgaatgtatgtgcaaaagcgtgttttctgacaagggtaaagcatagtcatacgacactccccattgataaggattctcaataaacatattaaaacattcttttggtattcctgattacctttaatacaatacttaaacctaagtgcagattatattatcctaacagaggagttccattacagttttgtgtataaaagcttttatatccgccccctttgtattctttaaatgcttttcatttattgaatctgcgcattgatttcgtttctgaactttataggattggtgataaagtcaaatttgttggtgaccccgcctgtagtaactacaatagaaccaaaaccgagcatacgtcccatgaggctttgattaatccgtatcccttcgcatttgtttaaaaccaattcaagggcatcccggcttaaaataccggattttagaatgactttcttgtttgtgacaacatattcagtgcccatcttaagaagaattctttttatcaattggaataatccggacaataatagaaataagctaacataatggaaaaatccggtttgtgcagaagaaaagaaaacgcttaataatagtagtattaccggatatgcaaatatataccagtgaatatctgctttgtattttatttcttcaccagcttgtagattgttttggatatagctcattgtttttgtaaattaatagattgcataattttattatcaaaagacaaatataaggataatcagaatggtataaaataaatcttggtttattttaaagctgaaacttaaaataaaaacaattcttcctgtttttcttcttgtcaatatctcttttcttatcaaatattttcttcttgtacttgttgtttcaagaatttgtaatccttataattttttcctctctttattcggaaagttagtttatgccattcgtcttttgttagggggatatccacgttcatacaaaaatagcaggtttcgtagccaatgagaggggaaatccatatttttcctatacattctttcttgccggagttggaataatataaaagacagcgtactcttcttatttgtatgctgtcttcattgcatacttttatctctatacgtttaccttttccgatgttgtagaattggggagtagacatttttattttgtttaaaatactatctttatcatttacacagactacggtgaacttctctatattgtttggtgattgggagaaagtgctttttgtggtaaacaacaatattaaaagtaatgttataatttttttcatgtgattggacttgttggttaaagcagtagcagattattaattaagattttactcttctgataatagatacttcatactgcaaagtaaatattttttttgttttaagggttataattgttaaaatgcaaaaatagcctgcatctgccaatctgtcaagggctgtttttcataaaaaatgttcaattctttggtatttcttttggattttcttggtatgaaatttctgatagattatatgaaaagtgatttgaaggctattgcaattcttttagagtggtgcattaagcaatgggaagttttaaaagcttgattggcatttgaatgctttatctttgtaatttgaacaaaaagtaataaataaaagaggtatatggacattcttgtatggggtggtcttggaaattccgattatttggaaaaaatgatgtcgttttccaatatatatttgtacttttggctgaaaagaaaacaaggtatatcccgtgtttatatttggtgtttttttatatgtattttaaatggactgaggttttatgacaaacattatagataatatgctctctttgtgtccggtttctgaagatacgatacaagaactgaaaaaatgtatgattttatgtcgtttccctaagaaatatcagttaataaaggagaatacattttgtaaatcagcttatttcatagaaaaaggaatgacgcgttctttctggcttgtaaatggagaagaaataacaacctccttttcatgggaaggaggtattgttttcagtatggacgagttgtactataataagccgagcgaggaatttgtggaaacgcttgaagatgtagttgtttacaaaatatcattagttgatttaaccaagctgtttcagactaatattgaattggctaattgggggaggattattcatcaaaatgagtacaggcgtttgcatcgttctcacaaagaacggctgactttgcctgcaaaagaaagatatgaggagtttaaacaacagtttcctcaaatatgccaacgggtgaagttaaggtatattgcatcttatttgggtataacacttcccacacttagtcgtcttcgagctaaaaaataatttatgtattactgtttttttgtcataggacaaatttaaaagcctttaagttgtgtaactttgcagcattattagtaacggttaaaaagaattaattattaaatctattaatttattatggaaaaaatctcttctgcagcatttacagatacaaagcctcattatgatcttcttgatggattgagaggagtcgctgctcttatggtaatatggtatcatgtatttgaaggctttgcttttgctagtgccggtaatatcgagactctcaaccacgggtatcttgctgtggatttcttttttattctttcgggttttgttatcggttatgcgtatgatgaccgttgggggaagaatttcactatgaaagactttttcaaacgccgtttgatccgtcttcatccgatggtaattatgggtgctgttttgggagctattacgttctgtattcaaggttgtgtgcaatgggatggaacgcatgtcgccatttccatgattatgttgtctttgctttgtacaatattctttattcctgccatgccgggtgtgggatatgaagttcgtggtaatggtgagatgtttccattgaacggaccttgctggtccctgttttttgagtatataggtaatattctttatgcgttgttcattcgtcgtttgtctaataaagcattggctgtgctggttgtgttgctgggtatggcattagcgtcatttgctgttttcaatgtgtctggttatgggaatatgggagtgggatggacactcgacggagtgaatttcttaggtggaaccttacgtatgcttttcccattctcgttgggtatgttgatgtcgcgtaactttaagcctatgaaggtgaatggggcattttggatatgtactattatactgattgcgctgttctcggttccttatctggaaggattggagccgatttgcatgaatggtatttatgaagctttttgtgtaattgcggtttttccttttcttgtgtggctgggggcgtcgggtactactacggataagcagtctacaaagatatgcaagttcttgggagatatatcctatccggtttatgtagtacattatccgttgatgtatttgttctacgcatggttgattgagaataaactttatacattgggagaaacttggtatgtagctgtgggtgtttttgttttgagtgtcattttggcttgcctgtgtctgaaactgtatgatgagcccgtaagaaaatggctgagtaagaagtttcttgctcccaaataaaaatactgcatttcttgatggatgttcattaaaaggtcggacactatacaagaagatattacagctttgaataactgacaattagatgaatggcatccgatctgtaaattcggatgcctgcattcgattatttcaaaatgggctttaggattgatttccttttttggcaatagtcacacatgttgatgagagcattccgagcatagacctttcaggacataattgatactttgtacggtgaatccgggaggtagtgtcacgatgggcacgtggatacttttcatacaaaacgtgcgatgacagttctcacaataaaagtgagtgtggagatcgtctacctcacaattgcaatcattgctgcacacggcatattttaacgatcctgtgccgtcatcaatgccatgaaccaaatgatgggctaaaaaaagggttatggtgcggtagatggttgatttgtctaccgtatccaattcgttttccaaatccaacagtgaaaatgcttctttgtgctgcatcatggtttttagaataagcagacgtatggctgttggtttgatttcccgctgttccaatttttttaaatagattgtttcattcataggtcaaatcattttattcttttcatttctgtattctcattgcattaaaaatggcgagtaaagctacgcctacatctgcaaatatagcttcccacatagtggccattccgccggctcctaatagcaatactaacaatttcactccgaatgccatcgatatattttgccatacaatgcgatgggtctgttttcctatttttatagcttccgctactttactgggttggtctgtttgtatcactacatccgcagtctctatagcagcgtcacagcctagaccacccatggcaatcccaacatcgctgagtgccagtacgggagtatcattgataccgtctcctacaaaagctacacgattttcaaaatttgcttttaattgttctaaatgtgctactttaccttcgggtagtaaatcgccgaaagcatgtgtgacacctatcttttcggctaaattagaaacaattgtctgtttatctcccgataatatttgaatattattaatatttaagtctttcagctcgcggatggcttgtacagcatcaggttttggggtatccgccaatgaaagatatcccaaatatttgttttccattgcacatagcacgattgtttctgtcatgttgctgatttcatagggaaaagagatgccgtattttgataataaccgtgtatttcctacatatacttctttaccgtttgttacggcttttattccatatccggcaaattcagtgattctcagtgacgagttaagagatatactttgttcttccgcatatttgacaatggcttttgcgataggatgattgctgaaactctctatagaggcgataagttgaagcagttccttttgcgaaacaccttcggctgccgatattgcctgaacactgaatacaccttgggtgagtgttccggttttatcgaatactacggtgtttatttgggttatggcatctagataattaccccctttgaaaagaatccctttgtgagatgcggcaccaatacctccaaagtatcctaatggaatgctgaccactaatgcgcaaggacatgatatgactaggaatactaaagcccgatagaaccaatcatcaaaaacaaaaatgaattcaggttttatcagagagtataaataggggagtatgacaactagtatcgccagtcctgtcactatcggtgtataaattcgtgcaaaacggcggataaataattcggcaggggcttttctttctgctgcatcttgtactaaagtgaggatacgtgctaacgtactttgatcatacggtttgtttactttgatccgtaccactttatctgaagcgatcattcctgctaaaacttcttcttgtttatatagagtccggggaacactttctccggttagggcggccgtattaaatgaagcggaatcttccagtaaaaatccgtctagaggtactttttctccaacttttacttcaatggtttctcctggctgtactttttccggtgctgttattttatatgtgttattatatactacagtggctgtttcgggacgtacatccaataatgctttgatgttgctgcgtgctttgtgtacagctttgtgttggaaccattcacctatgagatagaacagaataacggcaataccttcccagtattctcctagatagaatgctcctgatacagctatccccattaaagtgaattcattgaaaactgattctaattttatttttttcattgtttctttttatttatggcaacaaagatagtggaaagaagatgcaactaaattgcaaattatattgtacttttacatcgggtaattttttatatacatgaaaaaaaaatattgggcttttttgataggaagctggtgtttgtctgtgggaatgcaggcggccaaagtggatactttgtcggtacatagtgacgcaatgaataaggaggttcaggtaattaccatctgtccggataaagccatggcaggtgaaaaatgtcccgtactttatctgcttcacggatatggaggcaatgcgggaacgtggctcggtataaaaccggaattacctcaaatagctgacaaggaaggaatcatttttgtttgtccggacgggaagaacagttggtattgggacagccctttgaataaggagtaccgttatgaaacattcgtatcaaaagaattggtgaactatattgataagaattttactacgaaagtggagagagggggacgtgctatcaccgggttaagtatgggtggtcatggaagtttatggttgtccatccgtcataaagatgtctttggaggaggaggtagtatgagcggaggtttagatatccgtccgtttcccaataattgggagatgaagaagcaattaggcgaagaagcgagcaacaagcagagatgggacgaacatacggtaattaatcagttggataagataaaaaatggtgatctggctgttataatagattgcggttgtgatgatttctttctggaagtgaataaggctgtacacgaaaaactgttgaagaagaaaataaatcatgactttatcatccgtccgggcgggcatacaggcaggtattggaataatgccatagactatcaaatactatttttcagtaagttctttaataaatcgaaataataaaatggataaaattgtttttattacaggagcttccagcggtatcggtgccggatgcgctcgcaagtttgcttcacagggagcaagtttgattttaaatgctcgtaacgtaaataaactgagtgcattgaaagaagaattagaaaagcaatatggtacggaaatatatttgcttccttttgacgtgcgcgaccgtaaggcggcaacgtctgctttggaatcattacccaaggaatggcaatccattgatatactggtgaataatgctgggttggttatcggtacggataaagaacaggaaggtagtctggatgagtgggatattgtcatagatactaatgttaaggctttgctggcaatgacacgcctgattgtaccgggaatggtggaacgtaaacgaggacatattattaatattggttctattgccggagatgctgcttatccgggaggtagtgtgtattgtgctacaaaagccgctgtgaaagctttatcggatggactgcgtatagatttagttgatactccattgagagtgactaatattaaaccggggttggtagaaacaaatttttcagttattcgtttccgaggagataaggaaaaggcggataatgtatataaaggtattcgtccattgacgggagatgatattgcggaaactgtttattttgctgcttctgtaccagaatatatgcagattgcagaaatgttggttatgcctacttatcaagctacagggacaattgtttcacgcaaataaaagaggtagaagagatataaataaaggcgaccctttataaagccacctttattcttaccttctcattttaccttcttaccttaaaaaacaattataattcaataatcaatgattgacgtgcaccgactgtcatatttttggtaaggtcaatttttttgccactgataagttctttaccgctttttgagtcatttgtcattatgcggtagtggttattagccaccacttgttcggcattggtgctgtttaggacaatgagttcagttttcccagaattagtacgtgcgtacatatatattccgtgttggggaatatggtacttaactgttttcttttccatcttcgtttaatttagtttggttttacggcgacaaatttatatgtttttcagcatatcttatataactaatcattcaaaattcataataaatcattcatttcttaatctatatcaataaaaaatcctcttccacatattagttgaagaggattttatttgttgttgttcaatgaattacatcaagaatccaagtaaaataccggctgctacggcagaaccgattacaccagctacgttgggacccatagcatgcatcaacaagtagttggtaggatcatattccagaccaataacctgagagatacgtgccgagtcgggaacagcagatacaccggcattaccgataagcgggttgattttgttatccttacctaataccaagttgaatatcttcacgaagataactccagaagcagtagcaatgatgaatgacaatgcacccagcgcgaaaatcaagatcgaatcaatggtaaggaactctgaagcttgcgtggaagcacctactgtcaatcctaataagatggtaatggtatcaatcagcggaccgcgggcagtttctgctaagcgacgggttacaccgctttctttcaataagttaccaaagaaaagcatacccaatagaggcagacccgacggaaccagaaaacaagtaagtaacaaaccaatgatagggaacattactttttctgtatgagaaacgacgcgtggtggtttcatacggatcaaacgttcgtgcttggtagtgagcagacgcatgataggcggctggataaccggtaccaatgccatgtatgaataggctgataccgcaatagctcccatcaggttaggcgccagtttggatgaaaggaagattgctgtcggaccgtccgcaccaccgatgatgccgatagcaccagcctgcatcggatcaaagcccattgccaatgcaatcatgtatgcaccgaaaataccaaactgtgcggcagcaccaatcaacatcagtttaggatttgaaatcaatgccgagaaatccgtcattgcaccgatacctaaaaagataagtggtggataccatccggaggtaactccttgatataaaatattaagaacagaaccttcctcatagatgccgactttcagtccggcttccatgttgaaaggaatattaccgatcaagataccaaaaccgataggaatgagcaacatcggctcaaattccttggccacggcaaggtatatgaagaataaacctatcaggatcattacgatatgaccaacagtagcattggcaaaacccgtatatgtccaaaagtcagctaggttattccctaaaaagttgataaattctcccatattattcaataattacaaggtcagtaccttcgagaacggattctcctttacttacattgattgcggtgatcttgccgtctttgtctgcgttgatgttattctccatcttcatagcttcaaggataatgatggtttgccccttttttacggtatcaccaacatttaccttaatatcaaggattacacctggcaacggagatttaacgcccgattttcctgtagaagttgcagcaggctttactactgtagttggagccggagcagggctggttgatgcaggacgaactaccggtttcattacagctttcggggctttttccatttctactttgtaaggagtgccgtttacttcaacatgagcgatattatcttctatatctccaatggcaaccttatatatgttaccgttaatcttatatttatattctttcatcgttttatctttttattggtgacttactttttgtggggagtttcacgcaaggtataaatcttagaactccacggtgaatagctacgttttacacgagtaatggtaagaacagtttcttctacatcgtgtacatcgctttgcatttcgtgcatagccatggcaattgcggcgaatacttcgcctggagcttcacccagtttcttttctttggcttcttgtttgtcggtaataccttttaccttcatggcattgcgcttgctcaggttgacagaaatacggcctataactttgaaagcaataaacagaaggagcaagcctacgaatacgacactcatagctgatatggacataccaatacccacactgtcatgttcttcaaacttttccatcttagcgttgctgttgatagtcttgttgttagtgctaggagttacatacttgtctgcactagaaccttttacttcccattcatttgcagcgtcgctgacacgtgcgtatgattggtttgcctgtaatgtacctgcaggaactataatctgatccaataatttcttgcctgaatcatacaagccgatccaattgttcgttgcggcattcagggtgaagttggtgtggaaagtaccacggttaggttcaccatctgcccagaacaaagcgtgctggcgaggtttgatcaaagtcaatacatcacctttagggataaaataagtagcagtatctccaggctggctgctcaccttcagtaaacaaccggcaaggtctgcgctaccaaatgatctattgaatatttcaatccatgcgctgtgtactccgtagtcatcttggaaattgctttcattttcaatcagcacttcattcagtaccagcttggtgtttgatttctgttctccacaagaacataaacccaccatcagcagcaaagaaaggaatattcctatatttaatttcttcatgttcaattctcaatttttaatttttaattaaagaggaatattaccatgcttcttagccggattggttaatttcttagtttgcaactgttgcaatgcacggatgatgcggaaacgggtattacgcggttcaatcacatcatcaatatagccatatttggcagcattgtaaggattggcgaacagcttggtgtattcagcttctttttcggctaggaatgcggcaggattttcctgttctttggcttcgcgggcgtataatacttctactgcacctgcaccacccataacggcgatttcggcagtaggccatgcataattcatatcaccgcgaagttgtttacagctcattacaatgtgagatccgccgtatgatttacgcagggtaattgttactttgggtacagtcgcttcgccgtaagcatacagcaacttggcgccgtggaggattacgccgttgtattcttgtcctgtgcctggaaggaatcccggaacatctaccaatgaaacaagaggtatattgaaagcgtcgcagaaacgtacaaaacgcgcacctttacgtgacgcattgctgtcaagtacacccgccagatattttggctggtttgcaacaatacctacagattgtccgttgaaacgtgcgaaaccaatgatgatatttttagcgtagtgaggttggacttccaaaaactcaccattatctacgatggcgctgatcacctcatacatatcgtatggtttgttggggctgtcggggataatttcgttcaaagagtcttccagacggtcgataggatcggtacagtctacatagggagcttcttccagattattttgaggaatatagcttaacaatttgcggatcatggctaacccttcttcttccgtcttggcagtaaaatgagtaacaccggatttggtagaatgaacgcttgcaccacctaagttttcttggcttacatcttcacctgtaacagtctttaccactttcggtccggtaaggaacatgtatgatgtgccttccatcatcaatgtgaagtctgtcagcgcaggagagtaaacagctccgcctgcacaaggaccgaaaatacctgaaatctgtggaataacacctgaagcaagaatattgcgttggaaaatttcagcataaccggccagcgcattgataccttcttgaatacgtgcgccacccgagtcattgataccgatacagggagcacccattttcatggcttgatccattactttgcagattttcagagacattgtttctgacagagaaccggcagaaacagtgaaatcctgtgcaaagatgtaaactaaacgtccttctatggtaccacaacctgttactacaccgtcgcccggataatgttttttctccatgccaaaattggtgcatctgtgttccacaaacatatccatttcttcgaaactgccttcatccagcaacatggctatgcgttcgcgggctgtatattttcctttttcatgctgttttgcaattgctttatcacctccacccatgcgtgctgtagcccggcgttcgataagctcttttattttttcaagttgattgctcattttacttatgattttacaatttacgattaaaaaatatttctatttacgcttgaaccagactaaatacactgatttcaatcgtgaatagtcagatctcgtgttttatggtttttcgcaaagctcagtcaggacgcccaaagttgatttgggatgtaaaaaagcaatttgcaaaccttcagcacctttacgcggagctttgtcaatgagacggatgccagtggtttccgcttcggctaacgcatttgccacaccatcttccactgcaaaagccaaatgatgcataccaccgttgccattatttttttcaatgaactttgcgatagtgctttcggggcttgtaggttccagcagttctattttaacatcacctactttcagaaaagcggttttaactttctgatcctctactgtttcgatattgtagcatttcagacctaatacgttttcataatacggcagggcctcttcaatgctctttacggcaatgcccaggtgttcaatgtgtgagattttcatgatcttataattttaatagtttggttttatactcaagttttcagataaaactgcacaaagaaagtaatttcgagttaaataaagaaatatttcttcaattttatttcttatttgcgagatgcttcacaacactttagacaaaaagacaaaaatgaattaaatatagaatttgcacaagagtttgttcagccacttccaactgaagcggaaccagcggcgtgtactgctctgcttgccgccaaagcggagtataaagtccctgtaaccgtgctttttgaacggtaatcctgcatccatgaattccaaatgtgcatatcctttttcgtgagcataggtaataggtgcccatacggctagaataccggggtaaagaaaagcataggttttccgcatacctcctgagaaccacagataagcactttcttttgagaaaagacagatagaaccacctatgattttgcctttatatttcacaagaaacactttggctaattctttttctgggttttgccatgctaatagccggaaaaagccgatgtccgggaaatgttttcttacctgtgaggaataggcttttttcaacattcgtgagaaatcttgaatatctttctcattgtcggctacttccatgatggcaccgtttctcaacgctttgtttatttgtcttttgcgagacatgctcagccgttcgtaagggactttactgtgcagtgagttacgtactcttagccaattaatggcgaaatagttgttctttctgaaagctttgtatccgaatagcggattttccaagttgcggaactcgatgaggaacgatttgcataatacttcgttggtgagatgttccaacatttccccaaacaggtcttccttattctgttcttcatcaaaatactcgcctgtgccataaatctcgcatcgtttgatgattgcgggggggaacaagcgcatactcttccggatgacagccagcagtttgcctacaggacggtttcctatataggctacgataagcagaggttcgtatccccgagtcatttcaaagacatgaaacaactcggtagaatggaaaatgtttgttccaggcagagggggaatggcatttcctttgcgatatgtacttaatctgacaggcatctctaattgcaaatttattgtttttccttaattccgcaacactattacaaatataactttttaagtacctgagcaacaaaaagttgctcaggaatttgccatgtcagatttttcacctatcttagtgttgcaaatcaaaatatgtatcaaacccgacagacatggcaaaggtagcaattaaatccgagaaactcactccttttggaggaatattttcaataatggagcaatttgactccagactctcatctgtaatcgactcaaccctcggtatgagatgcaggctgtatggttatcaatacagcgaaatcatccgttcgcttatgagcgtttatttttgtggcggctcatgcatcgaggatgtcaccactcatctgatgtaccacctttcgcttcatccgacacttcgcacatgcagtgccgacacgattcttagagccataaaggaactgacccaggataacatttcctacacatccgacactggcaagacctacgacttcaacacggcagacaagctgaatacactgctcctcaattgcctattgtccacagggcagctgaaagagggcgaggggtatgacgttgacttcgaccaccagttcatagaggctgagaagtttgatgcgaagcctacatacaagaagttccttggttatcgccctggcgtggcggttattggcaacttgattgtcggcattgagaacagcgacggcaacacaaatgtccgtttccaccagaaggacacgctgaagaggttctttgaaaggtttgaacaaaacaagcttattatcaaccgtttcagagctgattgcggctcgtgttctgaagagatagtggaagagattgctaaacactgcaagaccttctatatccgtgctaaccgatgcagttcgctctacaatgacatctttgccctcagaggttggaagaaagtggaattgggcggcattgagtttgagctggcctccattctcatcgagaaatggaaagggaaggcataccgtcttgtgattcaaagacagaagcggatagacggcgaactcgacctgtgggaaggagaatacacctaccgctgcatccttacaaatgactacgagtcttccgagaaagagattgtcgaattctataacctccgtggagggaaggaacgcatcttcgatgatatgaataacggattcggctggaacaggcttccaaaatcctttatgggagaaaacacggtgtttcttctgcttatggcactcatacgcaacttctataaattcatcatggcgaggcttgacgtgaagaggttcggactcaaagcaacaagccgcatcaagacgtttgtctttaagttcatctctgtgccagccaaatgggtcaggacatcaaggaagtatgtgctgaatatctattcatgcaacaatgcttatgccaatgtgttccagaatgactttggataacaccgacaacttatagtcgtgattttgcgtattgcctcaagtcgcatggtggggtaaggggcatttatatgtctttatggtgacattcgatgcactgtgccccctttttactaacgatgcagattcttttcgcttctgtatcatattaggcgcgtagttgcggatttgaggttttttgtttatcaatccacattctagttgtatatttgtgcagaaaaataaattaactgagtatattatggaacaatttagtgacttaataaagaacagacgcagtatgcgtaagttcacggatcaagagttgacacaggaagaggtggttgctttgttgaaggctgctttgatggctccgtcttctaaacgtagcaattgctggcagtttcttgtggtagatgataaggatatgctggaaaaactttcccattgtaaggagatgggggcagcttttctagcggatgctgctatggctgtagttgtgatggctgatccgttggctagtgatgtttggattgaagatgcggcaattgcttccataatgatccagttgcaggcagaagatttggggttgggaagttgttggatacaggtgcgtgaacgttttaccgctaccgggatgccctcgggtgaatacgtgcatacgctgcttgatattccgttgcagttgcaggtggtttccattatagcggtaggacataagggcatggaacgcaagccttttaatgaggaccatttgcaatgggagaaaattcacatcaataaatttggaggcaagtaaacgtggctgctgtcaatcataaggatacgtataaagcttctgcggtgtttctcattgtgatgggtatgctttatctgatcgataagtttataggatttgcctcacacgggttgccatgggttatgcagaaagacaatctgttactgtatgcagctgttattttcctttggttcaaggccgataagtcagtaggaattgtattggcgggtatatggctgatattgaatatcagtttggtgatagctttgttggggcagatgtctgcttatttgttgccggcggctttgttgttgttaggagttattttatatttagtttcgacccgatgatgaaaatagttctgataggagccggcaatgtggctacccatttgggaatcgctttacaaaaggcagggtgtcttattttgcaggtatacagccgtacagaggagtctgcttctgcattggctgacagacttttagtagactacacaattgtgccggatgagatacgtcgggatgccgatttgtatattgtagcgctgaaagatgcagttttgcgacaattggctcctgtattggtgaaaggaagggagcaggctttgtttgtacatacggcgggtagtatgcctatggatttatggaaggggttggtaaaacgctatggggtactttatcctatgcagacttttagcaagcagcgtgaagttgatttcaataccgtacctttttttatagaagcatctgctccggcagaagtgggagtgctgcgtatggtggcagttcgtctcagtcctaaagtgtatgaagtgacttccggtcaacgtaggcatttgcacctggcggcagtctttgcttgtaattttgctaaccatatgtatgcattaagttcacatatactggaaaagcaggggatttcttttgaagtgatgcttccgctgatagacgaaactgccggcaaagtacatgaactttctcccacacaggcgcagacaggtccggctgtacgctacgatgaaaacgtaataagcaaacatttggagatgttggcggatgaggagtctttgcaggaattgtacgaaaagataagtaaaagtattcatgatctccctttgtctgttattcagacaaataaagagggaaagaactcataagtggtatgataaactatgatttaaagaaaataaaggcattggtatttgatgtcgatggggtattgagtgcggaaactatttatttgcaccccaatggtgaacccatgcgtacggttaatatcaaggatgggtatgcattacagttggctgtgaaatgcgggctgcatgttgccatcattactggtggaaataccgaggcggtgcgtaagcgttatgaggggctgggtatcaaggatgtttatctggctgctgcggtaaagacccgggagtatgcccatttgaaggaaaaatatggattgcaggacgaggagatactctatatgggcgatgatattcccgattatgaagtgatgcgtttgtgtgggctaccttgttgtcctgctgatgcggcacctgagataaaagaaacagctgtttatatttctcatcgtaatggggggtatggatgtggccgtgacgtggtggaacaggttttgaaagctcaaggaaaatggatggctcatgaaagagccttcgggtggtaatgaaataaagaaaagctatgttggaaaatttagaaaaatataaaataatccttgcttccaattctccgcgccgcaaagaattgttatccggcttaggtataaaatatgaggtaaaaacactacccggcatagaggaaatctatccggatacattgaaagcagaggaaattcctttgtatatagcttgcgagaaggcggctgcttaccggaataccatgcatccggacgaattgattattactgctgataccattgtatggttggacggtgtagtcatgggcaagcctcataacgaggatgatgcacggcagatgttgtggaagctttctggcaagacccatcaggtgataactggggtttgtctgactactgccaggactcagagaagtttttctgctgtaacagaagtaacgtttgcagaattgtccgatgaggagatcgattattatattcgggtttacaagccgatggataaggctggttcttatggtatacaagagtggataggcttcattggtgtctgtggaatttcgggtagttacttcaatgtgatgggactccctgtgcagtgcctgtacacagaactgaaaaaactataagtctgtatgtgaacagtaagggacgtgtttttgttatttatatgaactataaataaaaaataattatggcttataaaatagctttttacgacacgaaaccctacgacgaacactcgtttacggaggctaatgagaagtttggctttgatatcaggtattacaaaggccatttgaatatgaataacgtggtgttgaccaaaggagtggatgtggtttgcatcttcgtaaacgatacggctgatgccgaagttatccgggcaatggcggataatggtgttaaactgctggctttaagatgtgctggttataataatgtggatttagcggcaacggcaggtaagatgaaagtggtacgggtaccggcatattcgccatatgctgttgccgaatttacagtggcattgatgttgtcactcaatcgtaagattcctcgtgccacaatgcgcacacgtgacggaaacttttctttgcatggacttatgggatttgatatgcatggcaagactgccggaattatcggtacgggtaagattgccaagattttaattcagatattacgtggatttggtatgaatgttcttgcatatgatctttatcccgattacaattttgcccgtgaacatcaggtggtttattgtactttggatgaactttatcatagttcggatatcatctccctgcattgtcctttgacagaacagacaaagtatctgattaatgattattccatcagtaaaatgaaagatggggtgatgattatcaatacggggcgtgggcagttgattcacaccaatgccttgatagaggggctgaagaccaaaaaagtgggatatgccggtctggatgtatacgaggaagaagagccttatttttatgaagataagtctgataagattattgatgatgacactttagctcgtcttctgtctttcaataatgtgattgtaacttcacatcaggctttttttaccaaagaggcaatgacgaatattgctcatactactctacaaaacgtgaaagactttgttgaaggtagacctttggtgaacgaagtagcggtggggagggtctaatctcccctgtagtaatacaataaggaatggcgggctataaagtccgcattcttttgaaccagttccttttcaccaaattcggggaattgtgcatcggggatatagtggttgtttattaaatattccatcaggtccggcggacatttggtcgggatagtaagcaggctgaatgcctcttgggcagctgttgcggcatcatacatcgggttaagaggatcactgatgtatttgcatatatccttcgccaatagaatacctttttcggaatttaccatcatgatgaaatccttatgttccttcatttggggcaaagtgtgattggaatcgtccggccattgtaatacttgggtaaggaaactgtgtagttctttatagcttttcagatatacgatacgggcaccatttgtgccttgcgtgaacaattgataggtatggtggttcctttccttcatctcgtccgatatttcgggaatggcagggtatagtccttctatctcttcccaacattcggtttctccgttggtcagcaggtcaatccattcatgaagaaacagggcaagggggccacatggaatgatgaatttgtcggtttctgtaacctgtgcaatatattcttgtacagatggttctgtgagataagtatgtccgaacagccagcgtagtttatggtttgcgtcctcttttcctttgaaatccataaagaactcctgtaacgtggcattggcgggagccgtttcatattcttcatccaatatccggaaaaataaatgtgcagtttcttcgatattcctgtccatcggattgatatacagatgtttatatggagccttctctaaagtgttccaaatgatgaaacggatatcttcctcattgatctcatcttttatataatccggtcggatggtatagaaaggaagtgacgtatcatatagttccagatgctttttgatgaatgcttgccatagacctaaacctgaaatgacatcttcaaaataggcagcggtgtaaagacataacttctttttaatggattcgggaatctctcttatcgtacaagtggagtataatcggttagccagatcgacaaaatatctgtctgtagtctgttgttggatataaggatggatagccaaccagtcttttatgtataattttatggtttgcatattagtttattggaattatttttattgcaaagatattcctttcattgtaaaaaggaaggagaatatcgggatatttactttatctttgcaatattctaactttgaaatacctataaaaatggaaatagatttaacaactcctgctttattgttctcagccatatcgctgattatgctggcatataccaatcgttttctgtcatatgcccagttagtacgcacgttgaaggatcagtatcgtgaaaatcattcggcggttacggcagcacagatttctaatctccgcaaacgcctttatctgacacgtgctatgcaggtgacaggtatcgggagcttgttgctttgcgtggtcagtatgtttttaatgtatatacagctttacctcatatccgtatatatttttggactggcattggtgctgctcattatttctttaggcatttctgtccgcgagatttatatttccgtcaaggcgctggaactgcatctgagtgatatggattcttgatttatctttttgcaaagatatttatcataaaggaacaggctgttaatgcgatccctgttcctactactccttgccatccaaaccaatgccagaatgttccggcaaggaatgtacctacggaaccacctataaaataagttgtcataaaaatggtattaatacggttggctgctttcgggttgagggcgaaaatcgtagtctgattactcaattggatacattgcatacctatatctataataaaaattccggtgatgatacccacgtaagagtcctgaccgaaataaagtgagaaccacgccacaaaaatcaagccacaacctatgtaattcagtcgtttgactcccaaaacatgtacatattttcctatatacgaggcggtgagagctcctgctatgccgcacaatcctaataaccctacaatattgtttcctgcaaagaaaggagcttgtcccattttgaatgccagcgaagtccacagagctaggaatgaaccgaaagcaattccggcacgtaaggaagaaatacgtaactgggggtattctatcactaatgaaaacaaggatttcatcagatcactatatttccctttaaaattacatggcatatcgggtagtacacgcatgataatgatgagacatatcaccatcattcccgccgctacaaagaaaataaaccgccatcccaaatattcgccgacgattccgctgactacgcgcgaagccaaaataccagtcagtaaccctgatacaatcatgcctacatttcttcctttggttttgggggtggagaattgtgcagctatggggataaagatttgtggcatcaccgaacaaatgccggtcagcagagaggcaaataaaatgagatggatataaggagtcagtgcgatggttagtaatgaaacgactaggactgtgaaattgattagaataatggttttccttttaaataaatctcccaaaggaataatgaacagcaatccgatggcataacctatttgggtaatcattgctatcaggttggcggtgaattcggatgtttggagatcacggctgatgcgatttaataaaggttggttataatataaattggcaacggagattcccgcaataattgctagcgtccaaagtaaggaggcaggtagtccttggttttcttttaattcttgtttcatgctgcaaaagtagtaatttcatgaaaatcatgttatctttgtaaagaagaaaaatagaaatgaaaatgaagaattgtataaaaacggtctgttttctgttttggacctgtgtaatgtttatagcgtgtattgatgatgatgtggaggaaggtactgttgatttacaaacaggagagaacattcctgttttttctgtggtaatggatgatggacaaataataacttccgaaaccctgaaaggagaggtttccttgattgtgttttttcatacgggttgtccggactgccggaaagaacttcctgtgctgcaaaaaatatatacggattacggtcaaagaatccggatggtttgtattagcagggaagagagttcggcagagattgtccgttattgggacgaaaatcatttgactttgccctattcggcccaagaaaaccgcacggtatactatcagtttgctaaatcggggatacctcgtgtttatgtcatagataaagagttggttatccgtagtgttttcacggataacccgttggcaagttatgaagatttggctgaggctatagaaacctgtttgtagtttttagagagggtaaaatccctaaaaataggtattgtcagataatgataagctcattacctttgccatcataaaaacagaatcacaactgactatacatgcaaatattaaaggataacatacgtagccgtattttggatgtagccaaacaacaatttgagttgaaaggttattccaagacttccatgcgtgagatagctgtggatgtaggtgttggggtgggaaatatttacaactactttaaaagtaaggatgagctgtttcatgaagttgttcgtccggttttgtatgcgttggaaatgctgttgcaggaacatcatggaatacagggcgaggatattatgatgatgaggtcggaagaatacttagaaacctgtataaacgaatatatttccttgtatgacacccaccacagattgatgaaaatactgttatttcgtgcgcaaggttcttcattggaacgttttcgggagaattatacagaccgttcaaccgaattagtcaaagtctggtttacggtgatgcagagaaagtacccgatgataaatatagctattcccgattttataatccatttgcatactgtatggatgtttactatgtttgaggagcttttgaggcattcaatagcgaaacaggaaatgaaagctattttacacaattatattctatttgagatccaaggttggagggccattattcgaatatgacaggtaaaatttgtatatacagactggttgctacagtaaggcagcaggaaaggaggaagtctttacggaggtttcctcctttttttatgaacaaatttgaataccgttcactaataatccgtttgatatagtacaattatatgaaaaagaagaaagaaggattgccccgtttgttagagattgcgggacagaagaaagggttgcttctgctggcaggtttgctgtcggtaggtagtgccatgtgtatgcttgtgccctattgggctgtctatgaggtgctgaaagagttgttgttgcatggcagcaatcctgttttggcaaatggaactgaaatgatacgttggggatggatcgcactgggtggacttgtcggcggattggttttgctgtacgctgcccttatgtcctctcatgtagccgcattccgaatcttgtatgggttgcgtgtccgtttatccgaacatatcggtaaacttccgttgggctatctgaacaacacttccatcgggtccatcaagaaaacgatggatcagaacatcgagaagatagagggattcattgcacatactatccccgatttggtaaatgtgatagctacggtggcagtgatgtttgtcattttcttctcattaaatgtatggttgacagtggcgtgtttgacagttgtcgtattaagccttttcctgcaattttccaattttatgggaaagaaagcgaaggagtttatgcgtgtctattacgatgcacaggaaaggatgagtacttctgctgtacaatatgttcgtggaatgcctatagtaaagatttttgggcaaagtgtatactcgttccgccagttcaatgcagagatacaggcatacaagacatttgctttgaaatgctgtgatacctaccagaacgggatgattgcctttactgttctgcttggttcaatggtgacattcattcttccaatgggtatcctgttgctgaatgccaacccgcaatctttgtcactggctgcggtatggttgttttttattattatgggaccaggtgtggcttcacctatttacaaactgactttcttgggtgggaacacacgggaaatcaatgagggggtagcacgtattgaccgcatactggagaggcaacctattcccgagccggaacatccacaagtgccggagaggtatgatatagaatttcgtcatgtgtcatttttttatgagaacacagaacagggaacacggacgaaagttttgcatgatatcaatttcaaggcacagcaaggggaaataactgcgctcgtaggaccatctggtagcggtaaatcgacggtagccaacttgataccgcgtttttgggatgtagagcagggcgaaatccttatcggtggtgtgaatatcaagcaaatagcaacagcagagttgatggataccgtatcgtttgtctttcaagacactttcttgttttatgatacgctgtatgaaaacattgccatcggttctccttctgccggtaaagaagcggtgatagctgctgctgaagccgcccaatgccatgatttcatagaacggttgccagatggttatgatactaaaattggggataaaggtatatttctttcgggcggtgaggcgcaacggatatgcgtggcacgcgccatcttgaagaatgcgccgatactagtactggacgaagccactgcttttgctgatccggaaaacgagtataagatgcaaatggccttgcagtctttgataaaagacaagacggttattgtaatagctcaccgtttgtcttctattgtatcagctcatcagattgttgtcatgaaagaaggccggattgtgcaatgtggaaaacataatattttatctgtgaaagagggggtatataaaagtatgtgggatgcttatagaaacgcttaccattggtcgttaaacaagaattaaacatatattgatatgagaaacaagcatttattaaacagtattttgcagaatacaagctgtccgaaaggtttttggggtcggatgattttatggggaatgaatcgttttcatgcttctttggcccgtcgtggtatgaaacaggtaaactggcaaccgcaatggactgtcctagatattggatgcggaggtggagccaacctgaatcgtttgttgaaacaatgtcctcaaggaaaggtttatggtatagatttatcggaagagagtgtagtttttgcaagcaaatacaatgtgaaagaattgaataaacgatgtttcatacagcaaggaagtgtgtgctccttgccatacaaagacgggacatttgatgctgttactgcttttgaaacagtctatttttggtcgcccatagagatagcgttggctgaggtggtacgagtcttacgaaaaggaggatgcttccttgtcggcttggaagcaagcagtcctgaactcggaaaaatgtggactgaacggataaaaggaatggtggtatatacagccggagatttgaaggatttgttgatagaggccggattttcaaccattcaggttgttcataataaagaagaaatgtatattatcgcacgtaaatgaaaggaacaggtatgaatgcgatcaaaaacattacaattggtcatacgaaacgtctttgtagaccagtaggtttaacagtgcttgccaatttgattaatattgtgccgttttgcctctctattgaggcggtacgtattgtttttaatacgttcgatggaagtggccggccacttgacacggttcgtttgtggtatatattcggagtgatggcttgttatatgatagtcatggcgttagcggaacgagcttcctatcgttccaattttagaggggcatatgagatgagtgcttcgggacgtctttctttggcagaacacttgcggaagctctcgttaggatttctttcacaacgtgatcccggtgacttgtcgtctatgcttattaccgatttttcaatggcagaaaccggaatatcccatcatttgcctcaactgatgggggctgtagttatgcctgtactagcttttgcttcactaatatggatagattggcagatggctgttgctatgtttgccgctttaccactggctttattcattttgtgggtaagtacgagtgtgcagaaaaaattgagtggaagtcaggttcaggccaaaattaatgctggaagccgatttgaagaatatctgcaaggtatccgggtggtgaaagcttacaatttgttgggagcccattttgaccggttgcgtgatgcgtttgcagaactgcgccgtgcctgtatccgtcaggaggcacagttaggcccgtttgtgctgctttccattgctttggtgcgtgccgggctgacattgatggtactgtgcggtacttatttgctattgagtggagatctctcgttgcctatttttatactgtttcttgtagtaggatctcgtgtgtttgacccgttaacttctgccttgaccaactttgccgagtttcgttatttctccattgctggagggcgtattttaacactgatggatgagccggaaatgagaggagaactgcaatctccggttacaggtgatatatgttttgaacatgtttcatttgcctaccgggacaaggaagtcctgcatgatgtttcaattacgctttccaaaaactcattgactgcccttgtcggtccttccggaagtggaaaaagtacagtaatgaaactttgcgcccgtttttatgacccacagaaaggacgtgttttttttggtgatctcccgatggataaaataaatccggaaagtttgatgagtcatatctctatggtattccaggatgtctatctgtttcaagatacggtacgcaacaacatacgttttggtaaggctggtgcaacggatgatgaaattattgtcgcagcccaaaaagcttgttgccatgattttatcatgcagttgccgcaaggctatgacacgatgataggtgaaggcggttgtactttatccggaggagaaaaacagcgtatatccattgctcgtgctgttctgaaagacgcacaagtcattctattggacgaagcaactgcctcgcttgaccctgaaaatgaagtggaaatgcagaaggccatcgatactctcatcaaaggtcgtactgttataactatcgctcataagctcaagacaatcatgaatgctaatcggataattgttttggacgatggtcaagttaaggaacaaggaacacatgatgaattgattcgggtagatggtctttatgcccggctatggaaaattcaggaaagtacttctggatggaatttatgaggaattctatttgattacacaattgaaaagagaatatgaattactattctcttttcaacttttcttaataggacttaaatatgaacagatgagaaaaaatattattttgcagaatattttaacgttgtgaaaataatgtattctctatccgaaagaagtgttttgcggaagagcggtcgggtagtaacaaaccagattaagattgttatcagatcattgttccatgcctcaaaacaaatatgatatttctcgtttaaatcatttttaaggatttgtcggacttttataaaaaactcctttattgttttttatttctatcattccgttgtctgaatcatacaggaatggtggaaaagtaaaaaagacataaatctcggtgtcttttagtttgtacagcttgggagtgatctttttactgattccgcttgggaatacttggtcatccatttcggtaggaatataataatctgctccttccctcaatacatttttgctaatcttggcttctgcttttgatttggcaatcgtatagaatccctctatatcatatttatcccaatttttatactcttgtccaagcaccatacttatgtttaaacataaaaccagtagtaataatattcttttcatatctatctgtttttaaggttattccaagttggtatcacaaatataagaattcttattggttttttcaaggaataaggaagaaaatagagagtagaattttaaaaaaagaaggtaatccctatccataccagagctcctgatatcagaacgattcctaacatgattaattttattttgaagagctggttagtttccgcttcttctttttcttgcgtttttattctgatctcttctaattgctcaagggatagatgggaggagtgctcttttttgttcaaatcaaccagtcggtttcgaatttcatttaagcgttcctttcctgcttttcgtagttcacgattttctttatctcttctcatcatgtcattgatacaacctaaagttcccataatctaactgtttaatttgaattcatttccacaaatatagtgttttttgcagttgcttttcttcacttgctaatttaatatttgaaggatagatattacttaataaacctgatgtgccttgactgccggatataaatattctgccaatggatttgtaatataaagttgtatgccattatgctttcataccattgcttatggggtaatatgttgataatgaactgtatttatatggcgtggcattttccccattgaaacaggtaaaaagtagatgtatttatcttatcattgaaaaaaaatgtgaatataaagtttaggtgaaagtgattttatttgtaaattgtataccgtcatgtaggtatctccgatctatgtataatttagtatatacctagaaatggggattgtgccgagcttttatgaattgtaattttgcaaaccaatagagaatgaaatgatttgtaagattacatatatttttttatttataatttgtagcaatgtgtctcttttatgggggcagacatttgtatttcggggaactgtactggatgagcagactcataaagcgttggattacgctacagttcaattgtttgtggataagcagattgtttatgggggaataacagatgcgaatggacattttgaacttctacatatccatcctggaacttatcgggttattgtatcctatttaggatatgattctacagaaaaagaagtgaaggtcattggggatatttcagcaatcttttatttaaaaccttcggtcatggcgctgaacgaggtagtggtgaccgcttctgaatcaaaacgcgctaccagcgcttctatcgttgaccgtacagccatgaaacatcttcagcccagcagtttcagtgacttgatggaattagtacctggaggaaagtcggctgatcctcagatggggcaggccaatctgatccggatacgtgaaacaggtaagacggaggatatctcttcattgggagttggattttatattgatggtatctcccagaatacggatgcgaatctgcaatatatgccaaacagtacttccgcagtgaatgcaacgagcacaatgtcaaaagggatggatatgcgtaccatctcaaccgataatattgagaaggtggaaatcattcgtggcattccttccgtggcttatggtaatgtggcaaacggtgcggtaatcattcagcgtaaaatgaatgagagccccttgtctgcgcgttttaaggctgataaaaccagtaaactgttttctgtaggcaagggaattcggctggatgggaacgggcgttatgtgttgaatgctgatttaaactatttggagtccaaaatagatccgcgtaacagtgtgaaaaattacactcgccttactgcttccgcccgcttggatggcaaatggttatggaatgaacgtaatattcattggaatatcagttccgattataccggctcgtttgatgatgcgaagagggataaagatgcgacagtaaaggaagattcttataaatcggactttaacagcctgaagatagcggggaaatggagcatgaagtttccggcccatttatggattcgtgaggttggtgtgactacttctgtcagtcagcagtgggagaagatgcgtgaaataaagtccgtttctctgaatcgtccggcagctattgctactcagacagaaaccggagagtttgatggcatctatctaccttataattatgtggcacagatggatattgatggtaaacctttatatgttacggcttccgcccgtacgcggttggctttcccgttgggggtattacagaatgcgatgaatatggggatggaatggaattatcagaagaatttgggagaaggccaggtattcgatgtgacacggcccatcagtgaaagtttgagtacacggcctcgccgttttaaggatataccggggctgcaacctttcgccttctatgccgaggaggtgttgaatcttcctgtaaatagacataaattggcttttacggctggtatccgtttgcagtctttattggggctggacactaaatataagatgcagggcaagatatatcccgatcttcgtctggacttgcaatggagtttaccggtatcaaacggatgggatgttgccttttcgggaggtttgggctggatcagccgtatgccgaccaccgcacagctatatccggattttaagtatgtagatttgattcagttgaattattaccataccaatccggattatcgccgtatcaatatgatgacatataaatgggataatacaaactatcaattggaaccagcacgtaacatgaaatgggaagtgcgggccgacgtcagctataagggaaaccgcctgtcgataacttatttccgcgaacggatgaataatgcttttgatgatatcacttattataggtcattggcatataaactatatgatcctgctagtatcgacggatcagcattgacggctcctccagaactttctcagttgacttatacaaatgaatataatctggatgtgtattccacacaaggtaatgtaatgaaggtgtgtaaagaaggagtggagtttcagttcgcttccaaacgaatagaatcgctcaagactcgcgtcactatgtatggagcctggataaagacaatttataattcggattctcctcaatataaggcctcttctatattgttggacaataaacagctgaaatatgtgggattgtacaatggggacaacggaacagaaagccaggcattcaatacgaactttatgtttgatacctatatacagcgtttgggacttactttctctacgtcggcacaatgcacttggtataccaacagacggaacttgtggaataatggcgtgccggtaagctatatagatcaatccggtgaaacgcatccgtttcgcgaagaggataaaaacaatattcagttacagcatctggtggagaaatattcagccacttattttgagcgtactaccgtgcctttttatatggatatcaatttgaaggcgagtaaacggatcggtaagtatctgaatctggctttttatgtaaaccggcttttgggtatttatcctgattatacgttacggggcgtactgcaacggagaacgtccgaatcgccttatttcggtatggaaatgaacttaactttttagtaaatgaacaataaaatagagatgaagatgaaaaagaatcaattgacaatgttagtcctttttgcgacaatgctgggatttaccgcatgtagtgatgatgacaaagtgagcatatccactgtaggtattaccactactgtagatacaactatcgaggggctgcaactgaccggtggaacctatacttttgaaaatgtaaatacatctgtcaagacagacattacctatccggctcagagtattgaactggcggacgggttgtataatgtaactttcattggtaagggaacttactcacagaatggaactccggtggaagtcgatgtacagggagtacaacagaatgtggccgtatctggagggtcgtacaagctggaactgaaggttcatgtactcaatacaggtgaccctgattttgtgattgccgagatatttattcccggaacctataatgaagcaggtaagcaatataatggcgaccagtatatacgtatctataataactcggataaagttttgtatgcggatggattgatatttatggaatcacaattccaaactactcagaaatatcaatcggtagatccggatatcatggatgaagctattgcggtaggctctgttgtagcagtaccgggcagtggaacagattatccggtacaaccgggagaatcctttatcctttgtgacaatgcgatcaatcataaagaggctaatccgaattctatagatttaagtaaagccaattttgagtggtatattgaatcaaagcaagatgtggataatccggctgttcccaatctggatgtttattattgttattccaaaactatctgggtgttgaataaacagggaaatcgcgcttatgctattggcagattacccaaaagtatgactaaagaaaagtatatttcagactatgcatacaactatacgtatattatgcaaaatggaacagccagtaaaccgcaaagcaaatataagttccccaatgaatgggtgattgatgctgtaaatgtaggtgcttccaatgaatggcagtggaatgtaacctctaccgggctggatatggggcatacttatatcggtatgaacaataccgttgcagaaaacatcggaaagtgcgtaatgcgtaaagccgcctacaaggatggtgatcgggaagtattgcaggatacaaataactctaccgttgatttcacacctgcggctactccgagcctgtttaacaaataattgaatccgtcttattgatatataaatctttattattcatgatgctaatccgaattatcattatgttgctgattgctttatttgtggagagtcggcaggaagccttcgggcagactaccgacacactctccctgtccgataaggtaatccgtaccgcttcatttgcgaccggatttcgtggcgagatatggcagaatccggcactttattattactatactccgtatacatggacaaggctggacgtaaatggagcttatcatgataaaggaaaagcatctttgaaacaggaaggtgataaggatacccgtatcggggtagatgtcaattccttcgttattctttcggaacgtgatcgtgtattcggttcagcaggatacaggagtgagaagcaggagaatgtgttatggaatgaaaatatagactggaaattgatagctccttacgtgactggtgattccattggtggtttcctgaagggagaaacttattatttcaatggaggttacgccagtgagtcaggttcctggacatggggaatcaccggtggttacagagcgtctcataattatcgggataaagatccgcgtccacgtaatacagcttccgatctctcttttgctttgggagcaggatatcgtctggggacatatcgtttgggagtttccgcagatttccggctttatcagcagaaaagtgagatttcattccttgcagataaaggctctacttcggtataccatatgttgggattgggcatggattatgtgcgtttcgccggaaaccagaccgggacgaagcatcaaggcatccggtggggaggaagcataggcattctgccagttgatacggaaaaggggatatcggccacagtttcaattgaccgtatgtcaatggacaagaaattgagcaatgccaataatctcactttgctggaattgaatacgactgatttgaaaggaaacgtgacctggatgcgggaacttcagcaggcagaacaccttgctgtgaaactggatgcaggctatatagttcgtaaaggaatggagaatatttacggagaggcgggcggaagctcctatggagcattaattagtacatctccgggaatgaaggtcacgaatagtcggattgccgtaagtggtttgtgggagaagcttttgaccgataaaggtgtatggggaggagcaattgtcccaaacataatctaccatcggttggaaacggattacaacgccgtatcccggtttgttcacttgtctgttttggagagttctttgcgtgcccgtttgctgtatcagaagaggctgctacgattgaccgcagaagctaacggtggatattatgccaatttatcggctgaatattctttaccgggattgaatgccgcgaagtcgtccgcccagactttattggcaaatattgactatttatctgatagttatagtatggtggggattcgtctgcaaggggattatcccatcatgaaacaatataacctgtctttgtctgttcaatggcaggcggcatattataaaaaatgcggaacggcccagtatgccgtttgttcattgggcatctttttttaaaaaataaaaacagttagcatatgaaaattaagtttatggtcgctgcaaccttaatggcagctttagtaactactacttcttgtggaaacagtaacaaacagagccagtctgaaaaaacggagcaggcggctccggcggcattgagtatcgataatctgctggtgcatgccgattcactggccaacaaggaggtgactatcgaaggaatctgcacacatacctgcaagcacggagctacaaaaatattcctgatgggcagtgatgataccaaaacgattcgtgtggaagccggacctttgggctcgtttgataccaaatgcatcaacgctattgtcacagtgaccggaacgttaaaggaacagcgggtagatgaagcttacttgcaaaactgggaggctaaactgaaagcacagactgaaaaatctcatggagaaactgctgccgggtgtgattcggaaaaaaaagcacgcggtgaaacagccagcacccctgaagcccgtattgcggactttcgcgcaaagatagcagaaagaaaagctgctaccggaaaagattatctgtcattctactatatggaagccagttcttatgaaatcgcagaataaaggtactgcattccgcaagtggagccggatcatccatcgtgatctgtctttcttctttgcgggaatgattttgatttatgctatttcgggtatcgtgatgaaccatagggatagcataaatccccattatacagttacacgaacggaatataaaataacagaggatctgtcggacaagagcaaagttaatgagaagatgattttgactttgttggaaccgctgggcgaagccggaaattttactaaatattattacccggagccggatctgattaaggtttttctgaaaggaggctcaagtctggtgattaacacccggacaaaagatgctgtctacgagggggtgaagcgccgtccgctgatctcttccatggtacaactccatttcaatccgggtaagtggtggacttggtttgccgatgcttttgctgtctgtctgattattatcactgtcagcggtatagtgatgataaaaggtcctaaaggattgtggggcagaggaggaatcgagttggtggccggtatcttgattcctattcttttcctggcgtgtttctaatagcaaacgaaaaatgatttataaagcatgagtgcaattatagaatgtaagaacctgacccattattacggtcaacgcaagatttatgagaacttgagttttgaagttcctcaagggcgtatcttggggttgttgggtaaaaatggtacagggaaaacgacaaccattaatatattgagcggttatcttcagccgcgttcaggcgaatgtcgcatctttggtgagaacattcagaccatgaaccctgctttacgcaggaatatcggtttattgctggaaggtcatgttcaatatcagtttatgaatatcacacaaatagaaaagttttatgcttctttttatccgggacaatggaaaaaggaggcttattatgacttgatgaataaattgaaggtagctccgggacaacgtatctcaagaatgtcgaacggacagcgttcgcaagtggcattgggactgatcctggcacaaaatccggagttgttgattctggatgatttctctttaggacttgatccgggctatcgccgtctttttgtggattatttacgtgattatgcccgttccgagaacaagactgttttcctgacttcccatattattcaggatatggagcggttgattgatgattgtattattatggattatggctctatccttattcaacagcctattgaaacgttgatgaaagagctgagaagatatacttgtactgtgcccgagggttatcagcctcagttgccggcaacttgctatcatccggctgtcattcgtcaaaccttggaaacgtactcctttttgcctcccgtggatgtggagaaactgttgaaggaaagtcaagttccctttactggtttgcagcacgaaaatgtaagtctggaagatgcctttatcggtcttaccggaaagtattaatatgtaaactaaatagaagaaatatgatacaagccatattttataaagagtggataaaaacgcgttggtattggttgctggcaactctttttatgatagggatcacaggatattccatgcttcgtattggccgtaccattgccatacagggaatcgatcatttatgggtagtgatggtccagaaggatgctatatttattgatttgttgcaatttgtccctttacttatcggtatcttgcttgctgccgtacagtttttccccgagatgcaacgtaagtgtttgaagcttactttgcatttgccttattcacagaagaaaatggtcatgtcaatgttggcctatggcgtacttgcactggtgacctgttttgctatgagttttattatgatgggagtttatctgccacaacattttacaagtgagttggtgcagcgtgttttattatctgcggctccatggtttcttgccggatttgccggttatctgcttgtttcatggatttgcctggaacccacatggaagcgcagggttttgaatctgattattgcggcattgattttccgtgtctactttctggctccgggagcggaggcatataatagtttcttgccctgtctgacactttatacgttgcttgccgcttctctttcgtggatttctgtggtacggttcaaggccggtaagcaagattaattgaatgtttattattaaaaaatcaaacaaacatgattcgattcagcaaaatatttttttatattaccgtagctgtcctgcttgtatggcagttgccttggtgttatgcttttctcacactgaagcctgtcaaaactccttttactatgtatagttccgtacttggtgattttgttattacacaactagatgagaataagcaacttcaccgctatgatacgaaaggcaatacatatacacaacagcaggtagacagtttgttgccttctctctatgtgcgccagcttacggcggacgaacgtttccctgataccatttgtggtaaggcagttagtccgaaagatattcaattgacaaactttactttcaagagtgtgccgtcagccatcaatgctccccagacaggactctattttctgatggagtccatgtccaaacgggtggatttgaaaatgcccgaagatgcatcccgttttaccgataaaggtatagaatttattcgtatggagacgaattgtatcgatgaggcgaaaagcaaattgtttacggatatgctggttcagaaagggtttgcttttcctgcatgctatgcttcgggcaatccaactactcgtaaagactatgatgagggatatctggttttagatgccaaccataaattgttccatctgaagtgcaccaaaggacgtccgtatgtgaaagctattcagttgcctgaaggagtcttgccggaatatgtgtttattactgaattccgtagccgtcggactttggggtatatggtagatagcaagcatcatttttatattatcaatagtgatggaagtttggtgaaatcagctctccccggtttcgatccggcaaaagatgaattgaccatctttggaaatatgtttgactggactgtaaagttatcgacagataaagatgattattactatgctttggatgctacagattattcactgattaaagaacatgcctataaagatatccgccgttctgttccggggttgtcttttacatctccagatgacaaatttgtaaaacctcgtttttgatgtgaatttggcaggggaagtgtgatattaaaatgtatattagttcgaacagaccgaaaacaactaggtaaaggggctatcatgttaggcatcagctaactctaccttctgtgagatactgcaaatacgggattatataattgtgcggacagacaggagggcgtgaaaacagccttcctttttttgataatatttaagatacagggatttgatctagtttttcttgctcgtcaattttatattatgataatcgttctttgagtatatgcaggataaaacaggttgttgaattttgcttgtttttaaattttcaaaaatgccagattgcatataaataatcttcgttttgacctccttttatcctaaaccaactcttaattgtataaccgatttatgatttaaagaaccaatttcattccgtaattttagacaattatttgcaatacttttgattgatattgaaaaataggagggggtgggtcatcagttaaacgaatgaaattactggaaataaaaatccctataactgcaatggttatagggatttatatattagcaatgtattatattacttgctcaaagcagtagcaacgtctacagcacaagctactgtacatcctaccatcgggttgttaccgataccgaggaagcccatcatttccacgtgagcgggaactgatgaagaaccagcgaactgagcgtctgagtgcatacgacccatagtgtcggtcataccgtaagaagcaggaccggcagccatgttatccgggtgaagagtacgacctgtaccaccacctgatgcaactgagaaataaggcttacctgcaagaacacgttctttcttgtaagtacctgcaaccggatgttggaaacgagtcgggttagtagagttaccggtgattgatacgtctacaccttctttccacatgatagctacaccttcgcgaacatcatcagctccgtagcatttcacttttgcacgaggaccgtcagaataagcgatttcacgaactactttcagttcacctgtgaaataatcgaattcagtctgaacgtatgtaaatccgttgatacgagagatgatctgtgcagcgtctttgcccaaaccgttcaagatgcaacgcagaggttctttacgtactttgtctgcttttgcagcgattttgatagcaccttcggcagcagcgaatgattcgtgacctgccaggaatgcgaaacatttagtttcttcgcgcagcaacatagcagccaggttaccgtgaccgatacctactttacggtcgtcggctacagaacccggaatgcagaatgcctgcagaccgataccgatagcttcggcagcttcagcagcgtttttgcaacctttcttcaatgcaatggcagaacctactacgtaagcccacttggcattttcgaaacagataggctgagtttcttcacaagttttataaggatcaagtccggcagcttcgcagattgcgttagcttcttcgatgtctttgatgccgttttcgttcaaagcagcaatgatctgtttgatacgacggtcttggctttcgaattttacttctctaatcatattctttcctccttataattattcgtgacgtggatcaattttcttaacagctccttgttcttcagttacacgtccgtaagtacctgtaactttcttcaatgcttcattagcatcagtacccttcttgatttcgtccatgaacttacccatgtgaacgaattcgtaaccgcagatttcgtcgttcttatccaggaatacgtttttgatgtaaccttcagccatttcaaggtaacggggacctttagccaaagtaccatacaaagtacctacctggctgcgaagacctttacccaagtcttccaaaccggcaccgataatcagaccgccttctgagaaggctgactgagtacgtccgtaaacgatttgaaggaatagttcgcgcattgctgtgttgatagcatcacaaaccaagtcagtgtttaatgcttccaatacagtcttacccggaagaatttcagcagccatagcggctgagtgagtcataccggagcaaccgatagtttctaccaatgcttcctggatgatgccttcttttacgttaagggttagtttacaagcaccctgctgaggagcacaccagccaataccgtgtgtcaaaccagagatgtctttaatttcttttgattttacccactttccttcttcaggaataggagctggtccgtgattaggaccttttttcacaacacacatgtgttctacttcgtgtgaataagtcatattctttacgttttttggtaataaaataaatattcgtaaaccacgtgaaaagattggttattcttttcgcccacaaagttagtcgttttattcttttctgcaacttgttgcccgtcactttttatctttaaataaaataaatttattgtaggacagcattttgcaaactagagttgccaaaatgttttttctttccgatgaaacctctatctttgtacctatattacaatgataggaatggaagcaaataaaatagcaattacagacgaagctttgcgccgaggtgcggaagagggtatggatggttttttgaaggtgtttatagataaatacctagaggtgacagggggtgttgtcaatgcggaaacaatgcctttgctcaatggttaccagcattcattgttggggtatcatttcttgcgtgaagaaataaatgaaggtggttttgtgcaattgatacagaatggttttggaccttatatctttgataatccttttgcaaaagcaatgcggcagtttggagcgaaagaatttgccaaattgatttatagcgcgaagaaaatatatgatgagaaccgtgctgatttggaaaaggacagggatgatgaggaatttatggcaatgtatgagcaatacgaggcctttgatgagttggaagagcagttcatggatatggaagagttggtaactgtccggattgcagaatatgtggacaatcatattgaggagtttgcggagattgtatgacaaggacttttgcgtacgtttgcctggtatagactcatgagttttgatataaaaaagtaaattggcttcaatggctaagtaagatagttcgttggctgacgaacctatgttatttggtcaagtaagttaacttacttttttctgttttgttattcctgtgtcatttattgtttcttgatagaccagcctttgatataagcggttgccagcacggcaagtcctgccgctaggcagattcctgtaaacatcagcccgtaaccgttcaagaaagctaccggagcgaaagttatcagggaaatctctaccggggcgatgaacaagtaagccagtgcatagttatccaggcatcggctgcgcattttggggtctgcaacgcggagcaatgcgatgcccatagccatagttcctgtaaaccatccccatgtgaagatagctttctcgaaccaacagtctttcattaatttgcgagccatgaccagaacataaatcagggttgcaattaatcctgagactaacagaattaataagggtatgatgtactctattacaacagatattttaatggaagcaattccaaaagctaccagaaaatcggtaaaagttccgctgatgtgtcctatggtttgcgggcagacataatcactggtctttgttttgtcgaatatctttttgatgaacatacccaccacaaatgcgcaactgaataccggcagttcaaaccccggcataaagtgggatactgttttgctgatgcagtatccgcctaatgctatcactgctacaatgataagattgaaggtcagcgggtcaatggagatggaagagcaagaactttcacccatgctttcccgtttgtcgccgggcaacaggcctgtctgtaattcgtgaggaaggtcatcgtaattggcgaggaaggaggtgtgccctttctttgtcccccattttataatgatcaatccgataatgactgctgctacgataccgaaggtggcggcagtcatggccaaagttagaatttcgtcatatccgaactggctgaaagcctgtccgatggctgctgctgtaccgtgcccgccgcaatagccgcttggcatagtgatgccgaaggcagggttcaagggccatatccggtttaagacaagcaatcccaacagtcccccaaaagcccattgcaacaacattcctgcctgtgaatatgcccacatgctgcctatattgtctgcatctcctttagctgccttttgtgaggtgagggggagggcaccgaaaatgaaggctatcaatatgccggcataagttcctgtttgggtggaaagaggaatgatgccgaaaccgtgaggtcccaaggccagtcccataaacccggccaacagactggggggaatgaacagcttttggatgaatcttatttttactctcatgagtttgccgagcagtagcaatactgagatgatgcctgtatcgacaaagagtgtccacggggtgaaatcggtcataaatttagggcttgtttggatgtattcgttgaagaatacagtgttcataaatagtttattttaccgaatcggtaggaatggaaatttatcttatcggcaaaaataatatacaggtatcatgtagattacatatttaactatatatttatgccgattcttttagtcataggctgatttaaaaaaatgttcttgaaaaatatagggtagatgaggattggttatgctgtagtccacttcattaccctatattaaattcaaatgtttcattttatatctttaagaatataagtaaccttggaacctttattgaatgctcctttccatttgccactcatctctatagtttctcctttgtcatttgcaaaaatagccaaataggttgctgtatattctttgatatatattttacattcagtcgttacttttgtatgtggagaaagttttagtgtttcttttgatttatatagaggggaaagcactgtttcgttaagggacagaggtgcatgtaagtcggatgataattttctatattcagaactcaaggtactggcattagctgtaatatcaaccaatatattctcttttaaagtcaaagaattgaatagttccgggtcgtcactgtaaaattgtgatgtctcttttatgtttttttcaaatgaaaaagtgatagacataggttcttctgtattgttgctggttattttaggaggcaactcaattgtatcgactttctcggcatcatttgcactaagtttccattgaatggattgcaactgataattgttgatatccagtttatcattgctgctgcaagagtatataaacaatgtacatagggcggtgatcaatgctttacatgatttcttgagtattagcataatattctagattttatggttaatgggtgttttgtttcaaagataggaaataaagtggtactatagctaaactgcttgttcttttatgtattaatttttattaatgggttaatggcagatagagtacaagtgaatctcagtggaaaaaatagctaaaacaaaagataaagcaagtcttatcagagaatgagatatgaataaaaaataatgttaaaaagtaagtgacgacgcagtatttaagccaatttttcatttaatcattaaaacaataaaaagaattaagtttctttcttggaaaccggttcttttatttaattttgcaaaccctaataattataaagaagaaaatgaaaaaaatgaaattggcagcaatatttgctgggttagtatcggtgtttacttttagttcttgtttgaatgatggtgatagcggctccaattatgatctttatgagatcgttactgtggaagaaggtagtatttttggtggaaccgttctgaaaggagatgtatggggatatacttatactccagtggcttcaagtgtattggctggtcttaaggcatctgacggcagttattacaagcgtgcgcaggtagggatcaaattgatggaaggagaagcaattacagaagggaaaaagtcttataaggtaagtgaagttggcgtattggctattttgaattataaagattttaatgttcagtctgatacattgagaactgattatgcactagtgtcattggaagattctaataataagatatgggccataaatggatatgttaacgtaccttttacttttaaaactaaagaacagctgagtatgaacgatttccatttatatgctgtagaagccaaagaggatacattggtgacaaaacttcaacagaccaaaggagctgatgatgcttatcagacagggagtgctttgattagtttccatatgccttttaatgatatgaaatttcgtgatattttcgatcaagtagtgcctaagagtgatactattgtagttaaggtgacggcaaagggagaaaatgataaagaacttgtttctacagtgaaatgtagtgcttcgaatatgcaagcaagctattaatgatattttattatatagtaaaatcctcttcagctacggttgaaggggattttttatttaatggaactatatggttcaattcataagataagggggatagaaatttgacggggactacttcttattttcctgttcatatctttctttagattcagtatatacctcctgcgtgtgaaaagagttaacatgaatttttaaacggttcgatctttctgctgccgtaataacaacatatcgcattcgttcctgttgcataaacattttctatctcttgattaaacctttttatgcggatgtattctatctccatagcctttggagttatctccataagttttggagttatctcccaagactatggagttaactccaaaggcttgcggagataaaacaggcaggaagaaaacccttaaccatacggcaagaaaggtttagaggtatggataagatcttttaaggatgaacctgattataaagctatgcattccctatggagagaaaattcccagacatccttcttttaaattaacatttagtttttttatattctaaagctttcaaagttttttcttttgtcattttgccttagttatatttgtccttcttctaaatttataataaaagtactcttattttttgattcccccaagagaagtatgcgttttttattcgtttattccagtgaattaattacctttgcatttcattgaagttgaacagaggtaaatagattaggcattgaactacaaagatttatttaagcgagtaatagcgttgatttcgtctccggcaaaagtgtgggaggaaattggcagagaagaggataggcgtaaagtgttgggagcatttgtttatcccatgataggcttatgtggtttatccgtttttataggtacattcataggaaatacggaaggagtcgctgctttccaaatagcgatgacacgatgttgtgctatatttgtatccttgtttggaggatattttttggcggcatacgccatagaccaattgggcaagaaacttttagggcgtgaagaccagtatgaactaaatcagcagtttgtaggttattctatggtagtgacttttgtgctcgatattgtcagtgggttgttttctatttccatccttcattggatattgcaattttacaccgtatttgtggtgttcgaaggtgcacgtaccctgatgaaggtaaatgaagagaaactgacacgatacaccttgattgcttcagttattataattgtttgtccggcattgattgccgctgtgtttaatgagttatctgttattttgaattaatgaaaccgactcctgttaatataaagaataagcgtgcatcgttcgattatgaatttatcgatacgtacacggcaggtatcgtgctcacgggaactgagataaaatccatccgtttgggcaaagccagcctggtagatacctattgttattttgtgcaaggcgagttgtgggtgaagaatatgcacattgccgagtacttctatggttcatataataaccactccgcccgtcgagaacgcaaattattgttgagcaagaaagaactgcgaaaattggaagaagccggaaagaatcccggttttacgattgttcctgtccgtctgtttattaatgaaaaaggactggcaaagttggttgtcgcattggcaaaaggtaaaaaacaatatgataagcgcgagtcgttgaaagaaaaagacgaccgtcgcgaaatggaccgtatgtttaaaagataaatattttataataattaggcacggattacatgaatttcacggttcccggttgtagcaaccacagaggaaatccgtgttgtccgtgtaattcgtgcctaaaaaatagacctatggctacattaaaacaaataatcaacgagcgggtcctcatccttgacggtgcgatgggaaccatgatacaacggtacaacctgtccgaacaggattttcgcggagagcgttttgccgggatacccggacaaatgaaaggtaataatgatttgctttgccttacccgtccagatgtgataaaggacattcaccgcaaatacctggaagcgggagctgatattattgaaacaaatacgttcaatgcccaacggatttcgatggcagactatcatatgcaggatttgtgtcgtgagattaatctggccgctgccagacttgctcgcgaactggccgatgaatataccgcgaagacccctcgtaaacctagatttgtagcaggttcggtaggtcctactaacaagacttgttccatgagtccggatgtcaataatccggccttgcgtgctttgacatacgatgaactggccaccgcctatcaggaacaaatggaggccctgctggaaggaggggtggatgcgcttctgatagaaaccattttcgactccctgaatgccaaagcggccatttatgctgcggaaacggcaatgaagaagacagggcgcgaggttcctcttatgctttctgttactgtttcggatattgcaggacgtactctttcggggcaaacattggatgcttttttggcatccgtacagcacgcgcctattttttctatcggtctgaactgctcattcggagcgaaacaattgaaaccttttttggaagggctggccgcacgcgcaccttattatataagtgcctatcccaatgccggacttcccaacagtttgggacagtatgaccagactccagaggaaatggcttcagaagtgaaggaatatatcgatgaaggattagtgaacattatcggtggttgttgtggtacaacggaggaatatattgcaaaatatcaggaattgattgtttccggttctgcctgggtgcctcctcatatccctgccaccactcctgagaggctgtggctttccgggttggaactgttggagcagactcccgaaatgaattttattaatgtaggtgagcgttgcaatgtggccggatcccgtaaatttctccgtttaatcaatgaaaagaaatatgaggaagcgctaagtatcgcccgcaagcaggtggaagacggtgctttggtgattgatgtgaatatggatgacggtttgctggatgcccgggaggagatgactactttcttgaatctggtcatgtccgagcctgatatagcccgtgtacccatcatgattgactcttccaagtgggaagtcattgaggccggactgaaatgtctgcaaggaaaatctattgtcaattctatttctttgaaggaaggggaggagaaatttatagaacatgcccgtctgataaagaaattgggagctgccactgtggtgatggcttttgatgagaaaggacaggcagatacttttgaacgtaaaattgaagtatgtgcccgtgcttataaaatattgacggagcaggtaggctttaatcctcatgatatcattttcgatcccaatgtactggctgtggctactggtattgaagagcataataattatgcggtagactttatcaatgccaccggatggataaagaagaatttacccggagcacatatcagtggtggtgtaagcaatctgtcgttctctttccgtggaaataattatatccgtgaggcaatgcatgccgtattcctttatcatgctattcgtcaaggtatggatatgggtattgtaaatcctgctacttcggtgctttatacagatattcctgctgatgtgctggaacggatagaggatgtagtcttaaaccgtaggcccgatgctgccgaacgtttgatagaaactgctgaggcattgaaaaatacggcgaccggaacagaagccgtaaagcaggatgtgtggcgtgaggaaccgatggtagagaaacgtcttcagtatgccttgataaaaggtattggtgatcacttggaagaagatttggcggaagcggtgaaactatatcctaaggcggtggatattattgaaggtccgttgatggaaggtatgaatagggtaggagagctgtttggagcagggaaaatgttcttaccgcaagttgtgaagactgctcgtaccatgaaaaaggcagtagctattttgcaacctcttattgaggctgataaacaagaaggtgcccgcagcgctggaaaggtattgatggctaccgtaaaaggggatgtgcatgatattgggaagaatatcgtatcagtggtcatggcttgtaataactatgaaattatagaccttggcgtgatggttcctgctgaaatgatagtccggaaggctatagaggaaaaggtggatataataggattaagcgggctgattactccatcattggaagaaatggcgcatgtggctgtagagttaaagcgtgcggggctggacattcccattatgattggaggagccactacttccaagctgcatactgccttgaaaatagcacctgtttatggaggtccggtcattcacatgaaagatgcttcacagaatgccttggtagccgcccgtttgctgaatccggaatcttcttctgaatttgtggaaaggctgaacaaagaatatgaggaacttcgtctgaaaaacagtaccaaacaggtaaaaacggtatctttggaggaagctcaaaaaaataaattgaacctttggtcataatgaagtgtcccccaaaagttagacacaaaacttttggggggcacttcataaagttacgactttttttatctgcccattttatccgaaagaataagaagctgttttgttggatatatttcttggactggttataatttactgagaaactcttccgctttttccagattttccggtttaccgatatcaagcaattgcaaatcatcttctacatagcactggatgtcgactctgtgacatatggagagatagaaatcgataatggaatattttcctctgggaaggagatttaaaattttaggagtagtcacttgtatcccgctataggcgtattcccgatattccccttctttataccggagtcctgccggtttggtttccatggtgtctttattgacccagccacgtaacagattgtcgtcattaaacaacagataacgggaggtcttgcgtgggctgactaaaagggtggcattgatgttagaactattctgatgataatacataagactttcaaaatcgcaattggaaaggatatctacattgtggagcaagtagcattctttccgcataattcctaagcctctttcgattatttcttcctcatccattcctttcatcagattttcgaatatcagttcatacggagtttcgccttctttggtaaacatatcctcaggatgatgtaataagtagtatgctctttccaaaccgccgcccgtatcaagcagacagtctgtctcgtccgagatttgtatatcgattccgaagttctggttagcttccagaaaagcgagaatctgattggaaaagtggtgtacattgattactatttcatcaaatcctgctgctttcagttttaagatgatgtgctctaacatggtttttccacccaccgttattaatgctttaggccgggtgtctgttaaaggtttaagtcggctgcctagtccggctgcaaaaatcattgctttcataatgttctttcaaatgtttgttctatattctgttctcggtgtattaactctacttttataccgaattttttattgaggtgttctgccatgtgttgtgccgaataaacagaacgatgttgtcctcctgtgcagccaaaacatatagataagttactgaatccgcgttccatatatcgttttaccgaagcgtctactaaagaataagcagcatccagaaatgggaatatttcaccgtcttcttccagaaagcgaatgaccggctcatccagcccggtgaaaggtttataacgttcgtattttccgggattatttacggcacggcaatcgaagacataccctccaccgttgcctgtaggatcatcgggaatacctttcttataggcgaaactcatgactttcactgtgagttgccgtttcttcaaatcatccttgaactgcttcagttcggtaagttcccttagtacggagcataaatagggatactcgggatattcattatgaagtaattgcctcaggttctcaatggcgtatggtacactttggataaaatgtggcttcttttcgaaatagccacggaaaccgtaagctcccaatacttgcaaggtgcggaagagcacgaaatgacgcagttggttgaagaaataatcacggtctacgggtttatatttacatagggcgtctatatattcttccaacagttcattgcgcagagtttcgggaaatttagctttagcctgccataagaaagaggctacatcatagaaaaacggtcctttacgtcctccctggaaatcaatgaaccagggtgctccatcctttatcatcacgtttctgctttggaaatcccgatacataaaagtggcggaagaactgcgtagcagtacatcactcattttttgaaagtcatcttccagcttgtcttcttggaactccagcccggtagctttcaaaaagcagtatttaaaatagttcaagtcccaaaggatagaacgttggttgaattcggcttggggataacagtgtgaaaaatcaaagccgtctgctccggcaaattggatagaaggcagtaagcggatggtcttgcgcagcatttctttctcctcttcggagaagacgctggtcgcccgccctttttcaatagcgttgaataaaaggatatctcctaaatcttcttgcagataacaattcttgtcttcagaacagatgtatacttctggaacaggaagacctttcttgcggaagtgtactgccatataaagaaaggcttcattttcttctttggaggtgccgtatacgccaatcagttttttagttccggtcagccggaaataacgcctgttggaaccggatgagggtaattctacaatctcttcgggtacttctccgaggtaggtttgatataggttctgtaaatcctctgtagtcataatcatattttggagcaaagatatatattattctcccttcctttgctgatttgcaaagaaagttaatgctttagttccaatttatgagaaaattacttgtttttactctttcatccgtatcagtgcatttgaaatgatggcagtaactccacctgttgtaatgccggatgagaaaatattctttattgattctggaaattgacatagtatttcaggaaccatttctacacttaaacctaaagcgaaactaagtgcgatgactaatgttgctttccggttaatcttttgtgctgcgataatacgaatgcctgctgaagctactgttccgaacatcagtaaagtagcgcctcccaatacaggttcgggcattagggagaaaattaatcctacactgggaaataatcctaataaaataaggaaacctgcaatgtaatagcctacatatcggctggctactcctgtcagttgtatcatgccgttattttgcgcgaaaacggagtttggaaaagaattgagaatacctgccagcatcgaattgaatccgtctgccaaaattcctcctgaagcacgtttgatgaatacttttccttctacaggttctcctgatatcagagaattggcagtaatgtctccataggcttctatggctgttatcaaaaatactaatcccaaagctatgaatgcggagaagtcgaaatccagtccgtatttgaatgggaggggaatattgaaaccaccaaaactttgtactgccgagaaatcaattctaccgaggccccaggcaactaaatatcctataatcaagccgataacgatggaactcatgcgtaggtagcggttggaacttctattaaaaaggataatgagaatgagtaccagtagagctagacctagattctcaaaacttccgaaagtgccgttgctttgggcggagacacctccgccacaagctgtgatacctacttttatcaggctcattccaatcaaagtgactacaatacctgataccagaggggtgattattttacgggtatattttaagatgcggctgatgaccatctctacagatgatgccacgatgcaagtgccgaaaatcagtggaagtccgcccagcatacctgccgagatgataggaccaataaatgaaaaactagttccttggatacataaaaggccggtgccgatacctcctatccgtttacattggataaaggtagaaatacctgaggcaaagagagacatggatactaggaaactggtcgtttccaaatccagttttaatgctccagcgatgataagaggcggagtaatgatggctacaaaaatagcaagcaaatgctgtatggcggcaaaaatggcctctcgtacaggagggcggtcgttcaatccgtaaatcagtccggtattggattgggcggtttgagattcctgcatgggattatcttattttgatttcacaattgtccagactttcaatgatggccaatgactctacgcggatacctgcattacgcaaataatctccgccatgttggaatgctttttcgatgatgaatcccattccggatagttcggccccggctttttctaccaaatcgatgatccccttggctgcattgccgttggcgagaaagtcgtcaataaaaagaacacggtctcctttggacaggaaatctttgctgacgcatacatcataagaacggtctttagtaaatgaatatacactggtggtgagcatattttccattgtgacgggtttctttttcttggcgaagacaacaggaagttccagtaagtagcctaccatgatggcgggagctataccactggcttcgatggtcataactttattgatattggtagaggcaaaacggcgtacaaattctacagcaatggatttcatgaggataggatccatttggtgattgatgaaattgtctactttcagtattcctccttcgaaacattttccgtcccgtaaaatgcgttcttttagtgctttcattcaaatagtattttataaatgagtcgcaaaagtacgtattttgcggcattatgccaaacgtttgtacaactatctctacagaagcttttttacttaatggctaggaaagttggaatagatagggctgtgaaagcataagctggtgtggattaaagaatgtttatttccacaaactttagtttatatatttggtatgtacttcttttcttaataatttagttctcaatatagttttcttaatttagtattcttacttaacgaagatattctaatggaggaaaatgactgaatatgatgtatatttttcttgtcttttatgatatctgtcggtaggtaaacatttaaatttaaccattatgaaaaagatatttttatcacttgtattcctttttggtgtaggaacttttgtcatggctgatgataccatgaaagtaaagaatgatacagttactgtggaagacggatttaaaaacatagacctgaaagaggttcctcaatctgttaaagatgccatagctaaaaaatatcccgaatcgactcttaaaagtgcttctctttctctaaaagaagaaggggtaaaggcatacagaatagtatatgtaaccaaagaaggagttgaaaatagtattcttattaatataaagacggctcctgctaaaacagctcctgctacaaagtagtttttgacaggtaatatagaatgttttattaatatattgaaagccaccttgctatggtggcttttttgatgggataagttctttttcctgtcggatttagactttatatatagcaaagaacagattgaatttgtaagaaatagggtatatgcttatatttgaacatagtttaaaatcaagtttataatcaaatagaaaaagtatgaaaagacaattatttgtagtgttagtgtgcatgacgatgtttgctgttacatcttgtggtgaaaagaaaggaaaggataaatttgaggagcgtatagaaaaagccaaagaatcggttgaagacgtgatggatgatgccaaggatcagattgaggataaagctgatgaggttggggaaactttggataaagctaaaaacaagatagaaaagaccaaaaagaaacttgatgaggctgctagagattgaggaaaattaactatgaatgaatggaaagagattgtcggctgatttatattaaaccagccgacttaatttatatttctagacctttgtttaccatttattataatggatattttcggtcttgaatttatctttagattcttcccgatgttgtggataacccactggaatcaaattgaaaggaatgatatggtctggtaaagataagactgaccttacctttgcaatgcggtcgttctccggatagaccgcagtccataccgctcccaaccccattgactctgctgccagtaacaaattttcggatgcggcggagcaatctagcatccagtaccggtctttttctccgttcagagctttgcttaaatcaccacaaaccacgatggctagtggagcctgtgccgtcatcttggcataaggcagttcggcggctagtttatctaatactgtacggtcatccactaccacgaaagcccaaggctgcttgtttactgctgtcggtgcagccatagcagcttttactaataagtccactttctctttttctatcggttgggatgtataggcacggacgctctttcgggcaaagatattttctatagccgtgttttttcctgtttcttctttttttgtttccatattgttacaacctcctgtcattagtaatgttattgaaagagtaacagttgtcagagttttaaagattgttgccgcattcatttttattattgattaataattgagatggaattctaccacagcttcaattcctttacggaatatatccagagagaagttttcattaggcgaatggatggcatcactttccaacccgaatcccatgagaacggtctttatacctaagatttgttcaaaatcactgatgataggaatacttcctccacggcgtacggcaagtggttttttcccgaatgctttagcaaagcctttttcggcagcctgataggcgggcaaggtgatggggcatacatatccttcgcccccgtgcatcggggttacttttacttgtacatattccggagcgatagactggatatagtccacaaacaattgggaaataactgcgtggttttgatgtggaaccagtcggcacgatactttggcatatgcttttgagggaagtacggtttttgaaccttcacctgtatatccgccccagataccacaaatatcaaaagagggacggcagctattacgttctaaagtggaatatcctttttcacctttcagtgcttttacgccaatggcttccatatattttttttcatcgaaaggaatttgtgcaatcatctcacgttcggcagccggtactttctctacatcgtcataaaaatgggggatagtgatgtgtccgtcttcgccaatgacttgggctaacatactgcacagggtattgataggattagctaccgctccgccgaagtgtccggaatgaaggtcacggttcggaccggtcacttctatttcccaataagccagacctcgtaaacctgtagtcagagagggaaggtccgcgcctagcatactggtatccgaaactagaattacatcggctttcagcaattccttatgttccttgatgaaggtattcagactgggagaacctatttcttcttcaccttcgaaaataaatttcacattgtgtttcagcagtccgttttttactacgtattcgaatgcttttacttggatcatagcttgtcctttatcatcgtcagcgccacgtgcccaaatgtgtccgtcgcgaatttcaggttcaaaaggttggcttttccaaaggcccaacggctcggcaggcattacgtcatagtgggcataaatcaatagggtaggagcatcattgcttacatgcttttgtgcaaataccaatggattgccttgtgagggcattactatggcttcatctgctccggctgccaacaaaagttctttccaacgtaaggcacaggccagcatatcgtctttatgttcgggtaaagcactgatgctgggaatgcggatgaggctgaaaagttcctccatgaagcgcgcttcattttctttaatgtattgttttatttccataattgaatgattcttatagttgtgtagtcctgtctatcagataataatccaaaatggtcatggcagccatggcttctacaatggggacggcacgcggcagcacgcaggcgtcatgacgtcctttggctttcatggtcgtgtctgtgccgttgatatttacagtatgttgctccatcagaattgtggcaactggtttgaatgccacacggaagtaaatgtcttgtccgttgctgatgcctccttgtattcctccggaataattactttttgtttctactcttccattattattataaaatacatcattctgctcgctgccttttagttccatggagtcaaaaccttgtccataagagaaaccttttacggcattgatacttaacatggcatttcctagtgcggcatgtaacttcccgaatacgggttggcctaatccgatagggcatcctttgatgacgcaactcactacaccacctattgtatcgccttctcctttgattttccagataagctctgccatttccttggctttccccggatcgggacaacgcacatcgtttgtttctatcaattcgaggttatagcttttgtaatctttatcaagtttgacagatcctacttgtgaggtataagctgtgacactgattcctagttgtttcaatgctaatttggctaaagctcctgctactacgcgcgaaatggtttctcgtgctgatgaacgtcccccgccacggtaatcacggattccgtatttttgcatataagtataatctgcgtgtgaagggcggaacagattcttgatattctcgtagtcgtttgaatgttggttcttgttccataccacaaatccgatggggcaaccggtggacttgccttcgaatatacctgaaaggaattccactgtatcaggctccttgcggctggtggtaagtaatgactgtccgggacggcggcggttcagttcctgctgaacgaaatccatatcaaccttaataccggcagggaagccgtcaatgacgccgcctactcccggtccatgggattcaccgaaactggttaaccggaaaatattaccaaatgaattgaacatattgcttgtagttttaaaagtttctttccgtaaagataatgattttagggataatatgcttgattgttgttgaaaaattagtgagatggataaaaatagggtacggattgtatgatttttacagtttggcataaaaaaactgcatggtttctacaatccgtacccgaaagctgtttcttaagattggaaacagggacttgtaaaagttagaattctactttaggtgctttatcagctccttcttcagattcaaaatatgggcgtttgtcaaatccgaacatacctgcaagcaaattgcggggaaaagtgcggatagctgtgttatatgcgcgtgctgtgtcattgaatcttttgcgttctacactgattcggttttctgtaccttccagttgtgcttgcaactctttgaagttctcattggctttcaagtcgggataagcttcggtgatagcgagcaggcggctcaacgcactacctacttcgccttgtgccttttgataggcctgcattttttcgggagtcaggtcatcggcgctgatctgcatttgagtggctttgctacgggcgtctactacagcttgaaaagtttctttttcgtgtgaggcgtatccctttactgtatttaccaagttggggattaaatcagaacggcgttggtactggttttctacattgctccacgctgtgctgacagattcatccatttttaccataccattataagaggttattccccaaatggcaattaatacaatgactactattacaataatcgttgactttttcatatgtatatactattaaaattatgaatattcttgttcttaaaaacggcttccggctcctccgcctccaaagcttccacctccgaaacttcctccgctaaatccgccgccacttccaccgtggccaccaaaaaatcctcctcccattccgcctatgaatggacctcctcctcggggacctttgtaattctcatctctcgaccgttctttccgtctgaggatatgtccgcaatttctgcatttatatactacttcttcagtctttgttccgttacttcggtctataactttggaagaaagacgttgcaatttgtgttttttgcaatgggggcagcgtgttttacgccagtttgcatataatccgatgccaataaatcctccgaaaatcacaaaaaagatgatgatgaattctaagggatcatcttcgctttcgtcattgtttatattttccatggaaccgtccagatagccgtttacggcccgtattcctgctaccattcctgcgttccagttattgtccttgaaatagggcagcatatagcggttctgaatccgtttgcagatggcatccggcaatatcccttcaagaccatatccagtagcgaactgcacacaccgctcgtcggtggaaagcaagatgaccagcccattgtcacgttctttttgtcctacgcccgtttcctgtcccagccggtgggcgaaatcaaaacaatcacctccctctatacctgttaccgctaccactaatgtttgtatacctgttttttgctctaaagcgtagaggatgctgtccatagtggtgacagcggttgatgaaaggataccgtcgggattgctgacgtagcgggtacggttttgcaaatgtaccatcggtatgtcttttatggcatattctttggcttgaaggtggacggagccaaggagcatgaaaaaagtaagtaaaaatgtcaattttctcattggatgtatttgtctacaaatgcttttactttttgggtatattcttcggtattgaacagataggaatgtgcatggtctgcttccagaactatccataatgctttgggctgaggttttgcctcatacaattggtacaccatccatgtgggtacgtagtcatctttatcaccatggataaagaacatgggcagatggcatcgggctacctgtttcaatgcggatgcttctttgaatccccatctatattccagctggcataaccagtcggcagtgtacattaacgggaattgaggcaagccgaattgttctttcaattctttggaaaattgatcccatacgctggtatatccgcagtcctcgacaaaacatttcacatagtcgggttgcgcttcgcctgaaaccatcatagtggtggctgcacccatcgagattccatgtactaccatgctggtactgtcaccgtaaattcgattggcaacctccatccattgtgttacatctttgcggtctaaccatcccatttgtatggcatttccaccgctcagaccagtattgcgcaaatcaggtaggaggatgttgaaatccaattttttattgtatagataacctatcatcatcatgcggatggcattgtctgtatacccgtgtactataattgcggttttggctgtcgggcggctggaagccacatagtaagcatgcagttttacgtggtcgggagaatagataaaggtatctttcagtgcttggttctgtttcagactatctatccatggttttagataggagtaagtcttaaacatatattgccaggaactttctaaattctttcccctgtttttagggcgtaaggaatagtccagcatatattgactggctccaagtaggactataataagcagaacgaatatacaactcgttccaataatcattttttttcttttcataccttatctatttgttccatatatcccatgcaccaaaggcttgcaataagagcatttctaaaccgtttttggtaattgcccctttgtctgccccctttttcataaaaagagtagtgtcaggattatataacaaatcataaagcaaatggttgggtgtgagatattggtatggaatattggggtattcatcggcacggggatacatacctacaggagtgcagttaacaattactttatactcatccatgatttcgggagtgagctgattgtaagtcagcatttcttcacgcaggtttcgtgatacgaatttgcattccaaacctaattttttcagtccgtaggcaatcgctttcgaggcacctcctgttcctagaatcagagcttttttgtgctggggttccaacaaggggtcgatagattgagtgaaaccaatcacatcggaattatagcctattagcttagtcttacctttttggcggacaattttgattacattgacggctccgatggctgccgcatctttatccagttcgtccaaataagagatgacttgttctttataaggtatagtgacattgaaccctactaaatcaggattagccaataacacagaaggcagttctttgatggatgggatttcgaagtttacatattcggcatcaatgttttccgaatgaaacttttcattgaaaaagttctttgagaacgagtgtcctaacggataacctatcaaaccatattttttcataaaactctatactttaaattatttcgttgctaaataaagcgtacagatacctagcgtcaaccgtttgaaactcacctgattgaatccggctttacggataatgtctgtcattatttcgccttgtggaaaggctttgatggattgcggcaggtaagtgtaggcactacggtctttagagagtagcttgcccaaagtggggatgactattttagaatagacagcatatagctgtttcatgggaaaccagtcgggttcagagagttccaaaatgactagttttccgttgtctttcagtacgcggtgcatttcgcggagtcctttgtcaaggtcctcgaaattgcgtacaccgaatgctacggtaatagcgtcaaagcgtttgtcgggaaaggtaagtgctgtacagtcttctttagcaaaggagatacggctgtccagtccggcggcttttactttttcacgtcccacattcatcatgccttcggatatatcggtacctatcagctcttgggggtgaagtgtctgacaggcttgaatggcaaaatcgcccgttccggtggctacatccattatgtattgcgggtgaaaaggtttcagccagttaatggctttgcggcgccagcttttgtcaatattccatgaaagggcatgattcaactggtcgtaagcaggggcaatgttgtcgaacattttctctacttggacgcttttcttttcgtcagcgttgtagggcttgattttttcttgtgggtagttcatgtttaattaaaattgaaaattaaagattaaaaggagagggtggaggatttttggattcctgtacttgtcttttaatctttaatttttcatttttatttatttcaagtattcggttacgttcttttctatacgtgcggcgatgttttcagtgtctgctttcacaaatttttcgccggtgatgtgctcgaacagttccatgtagcgttcgctgatagaatttacgatttccggagtcatttcgggaacttgttgtccttctttgccttggaaaccattttccatcaaccattcgcgtacgaattctttagaaagttgtttttgaggttcgccttttgcaaagcgttcttcataaccttccaaatagaagtaacggcttgaatccggagtgtggatctcatccatcaggtaaatagtgccgttgtgtttaccgaattcgtatttggtatctaccaggatcagtccgcgttctgcagcgatttcagtaccgcgtttgaacagagccaatgtatatttttccaatatttcgtattcttcgggagtagccagaccttgtttcagaatttcttccttagagatgtcttcgtcatgcaggcccatttcggctttagtggttggagtaatgattggttcgggaaatttctggttttctttcattccttcgggaagttgtacaccacagatttcgcgaacgccgtttttgtaagcacgccatgcgctaccgcacaggtaaccacggacaatcatttccacaggaaaaccttgacacataactcctacggtaaccataggatctggggtcgccattttccagttggggcagatgtcagtagttgcatccagaaatttggctgcaatctggttcagcatttgtcctttgtagggaataccttcaggcagaactacgtcgaatgcggagatacggtcggtagctaccattactaacttttcgtcattgatgttgtatacatcacgcactttgccgtggtacacacttttctgtcccggaaagttaaagtctgttcttgttaatgctttactcatgtctttatttataattaaaatcaataaattcgttttatgttttcagatttttcacttcgtccagaatggcatgaatgaagggttttctgtttttcttcaaacttctcgtatgcttccacaatgcgggtaaccagtttgtgccgtacaatgtccttcttgttgagttcgatgaaactgattcctttcacgcctttcagaatttttagtgcttgtatcaatcccgaagtttgtgaagatggtaagtctatctgtgtcatgtcacctgttacaatcattttggtgttcatccccatacgagtgaggaacattttaatttgctgggtggtggtattttgagcctcgtccaatatcactacagcgtcattcaaggtgcgtccgcgcataaatgccaatggggcaatttgaatcacattcagttccatatattcttttagcttggcggcgggaatcatatcttgtaatgcgtcatatagtggttgtagataagggtcaatcttatctttcatatcaccaggtaaaaatccgagtttttctcctgcctctacagctggacggctcaaaataatttttttgatttctttgtttttcagagaacggacagcaagggcaatagcggtataggtctttcctgaacctgcgggaccgatagcgaacagcatatcgttcttctcatattcttgtaccagcctcaattggttctcactacgggggacgatcggttttcctgttacactgaatacaatagtatcccctgttttctctatttggggtgaacgacctttcactatatctaaaatcacttcttctttcagtgaattatactgggcgcaatgcttttccaaagccaatatattctcttcaaaagcacacatttcctcttcgtctcccaatactttgatgacatttccacgtgccacaatttttaatttgggatacaaagcttgtatcattttcatattgacgttgtttacgccataaaatataacaggatcaatatcctctaaaactatatgtttttctatcatttaactagtttaggtactttacgtacttgtttatagggtgcaaatttaatgaaaggttttcattgttcttattttccgggcaatttatttgcataagctttttcagaaaaaggattttaatctatctttgcgaggaatttgaaaagatagttagattatgaattgtatgaaaggtgcatgttgcacgctattgtcacttttgttttccttgacagtttcttccggttgcaaggaaaaagatatgtccatgaagatgaatgagcctcataatataaaaggtgtaattagctataaacgtagtttcggtgatttgaatgatactcatctcagtgtagcgaagaaaataggaattcgcccgttggcttctcgttcggaagcagagggattgggtggtaaattggtccagataaaaccttgtgagcgttatgctatggattcgctgactcactccattccttttctgattccgcaagctagtgcgttattggatacaataggagccaattttttggattcattgagttgcaaaggattgaatcctaatcaaatcattgttacttctgtacttcgtacggcagatgatgtgaaacgtcttcgtcgtcgcaatggaaatgcttctgctaattcagctcatgcttttgggacaactttcgatgtcagttaccgtcggttttgtaaagtggaagatccggatggacgtcctatgcaggatgttagtccggatacgctgaagttggtattggccgaggtactccgtgatcttcggaagtcggacaaatgctatatcaaatatgagttgaaacagggatgttttcatataacagcccgctgaattattgaattttcacttggttagaggctttacgatgcggtatttcatatatttggcttatgatgggacaaattatcacggttggcagattcagcccaatggtgacagtgtacaggaaacattaatgcgtgctttttctacttttctccgtcaagaaatagaggtagtgggagcaggacgtactgatgccggcgtgcatgcacgtctcatggtcgcgcattttgattatgaccaggagttggattgtgttcagataacggagaaattgaatcgcttgcttccttccgatatagcggtttacgatgtgaagcgggtgaaggatgatgcgcatgcccgttttgacgcgacttatcgtacttataagtattatgtgactatccggaaagatccgtttaaccgtcattatgcttggaggctttttaattcattggattttgagaaaatgaatgaggctgcccgtgtattgtttgattatactgattttaccagtttcagtaaattgcatactgatgtgaagacgaataattgccggattatgtatgctgaatggacgcgggtgagtggaacagaatgggtatttactattaaagccgaccgttttttacggaatatggtaagggctgtggtaggtacgctggtggaagtggggcgtggtaaaatgactttagatgggttcaggaaggtgatagagaataaagatcgttgtagtgccggtagttctgtgccgggacatgccttgtttttagtagatgtgggatatccggaagaactgtttattgtttctccgtcagatatttccaatacctgacaggcatatcttgccggtgtttttggggattccaacgttctttgatacaaatggacttgaaatatgttttccaaagttcctgaaataatctctcattgttgtccatcaatgtttcatttagcattcctgtgaccagatgtgcttggcggggatcttcaaatgttacttcttccatctctgttagattatagtaatacccatattgtcgcttcacatcataaatgagccaacgctggtcggcaaaacggtctttgaaatgatccacagccagtggcagtgcgttgaattgaggttttacggctgcaaagaaagttccgtccgctgctttttggaaacggacgaactgcatgaggtgtactcgttctccatctactcttttatagattttcgcaagcttcagcacatcaggatcggcaaagttggtctcaatagaatgaggagagtttatggccttctggatatagtggaaaagcatttcgtccacctttggtaattctgataaccagcagcaggtcaagctgaaaagggcatgcttggagatttttttctgtaatccgcgccacacgcgtccggctttctcttcatcagtggctatgtgtatggcttcattgtaaaacaagggtagcggctcgccttccatcaagagcaagtcaggaaaggttttgcggaagtaagcatcgaaaatgcaagtcagcaagccttcaaatgtatggtcatagataaacagaatcattcgttatcagtaaagtttagtattaattggcgttcgtccactttctttttgggtttgggtactaacagtctgcgtactcctgtcggagttagttcattaacagtccgggtggggagttcgttgcaggttatgaagtattgcgcttttttcatcactacacctatttttttcagttcatagaatcccagttttgagaagcggcgtgacgcgatgatttgtcttgccgatttgattccgataccaggtactctgagaatcatttcgtaatctgcctggtttatatctataggaaattgttctggatgccgtaatgcccaacctaatttggggtcgatttccaaatctagatcaggataggagtcatcgactatttcttctactttaaattcttatcaatttgatggattaatttgaaagacaaacgcttatggaagttctgaaaagtctaaggtaacgatttggagattgtgctaatttcagtattttacaacctcatacttatgaggaactcttctatggacaaagatagacattttttagattagggaaaaaatttgaaggaaaaaataaaaaaaaagtttgggaaaggattggaaaaattcaagagagaggttgaggaattaagtgtatgtgtatgggggggggattgtataatcaatttgcagttaccgaaaaaggcatattcagaattcctgtatattgcttctactagtgattgcagaaccgacaattatatttaaaattaccccaatcaagtattccgagtggggcataaagattatttaaattgtaaccataccctatatattcaaactggcttcattcaaaggaaagtcaaaagatgttcataataatgctccttacattattatgacagacaagagtcatgacattggtaataaccgtcttttgtaaatcgtcatttatatgcagtgacaatttcatttccatgtctacgaaatttggtaataacatcttttaaaagtgtctagaattcctatcagttatgtacaatatctgaattctgattttatgcgtatttattcataaaattagactctatatctgcttacacaggttatcactatactatttcctgcaaataacatttgggaatatatcctgaattcaaacagacaatgcaacagtgtcgaattcattgttagttaataatttatatttttcctttggggtcatgtaacccaatctttttctcggtcttgagtttaagatgttttgaacgcgcattacctgttcattggttatgtccctaaagtccgtacccttcgggaagtattgcctaatcaaaccattgctgttttcattggctcctctttcccacgagtggtatggttttgcaaagtaaacaaaaatatttagtttacgtgcaatttcttcgtgaaaactaaattcttttccattatctgccgttattgtatgtatttggtctctaaaaggttccaaggcatcgatggcagctttagttagcgggctggcatctttcccgctaagtagtcttatccatactagtccagttaccctgtcgtttatagttaatagtgctcctttgtgattcattccaatgactgtgtcaatttccaaatcaccaaaacgtactttcttgtctactatcgtaggacgcttgtctatgtccacgcggtttttgataaaaccacgtccattagtcaatgcacctctcttcttatgacttcttccccgtcttcttaaatgcttgtataacaacttatctccatgctttttatcttcccaaatatactggtagattgtctcatgagaaactgtttccaagccctttgttcgcataaacccagtcacttgttctggactgaaatctttctttatgagtatatctacttgaattttcaagtcgtccgtaaacttcacgaagtgctttcgtgaacgcattctggacatatacttagcctgagcgagatccggtttgtaaatgccattacgtttatcactattacgacgtaattcacgacttatagtgctacgatgaactcctacaagattggcaatctcggttcttgactttccgctttgcagataagcggaaatgttatacctttgttcttcggttagctgtttcatattgcaactgaatgttggggaactggaagatgcaaagaaacaacttttccacaggggaacaaaagggaaagaaatcttctttctctgttcctctgaaaaattattcttttcgtatcttctcattgtcatcattctcactcctgttgcattatccgcttgaacttaggtatttcgtaacccaatggtttcaaagatgtttcctgtcagctcagagggaaaccgatccgctccaattgtactattcgctcatctgacatgtttcccttgcggtaatcccgtctttggatggtacaccaacgtcccaatgctccttcacggcaacctggccatcgcccttggcggttatggaacaggcgcaactgctcaaagttgccttgccagacttgttccgctgaccaaacaaatcctattttatccaacagaagccagcgatcatgggataatttccccagtttgtgcatttttcgttgtgtatgacaccatccacccagattcccctccgtcgatttagggaaacgctgatattttccgacaaaagacttcaactcctcgtaattcttcatccattccctttgaaggtcttgattccaaacaaagccgatctcatccaaagcccggatgcgctctttgctcaagcgtccattcttccgcctttcccgttgggtataacaccaagttgcaagcgggccgtcttcacgtttgggccagcgtccgcaggtatcaaagaagactttcaacgcacggtattctttcatccatttggagtcgagctggttccattcgaagccgatcaattctagctgacggcggcgttcctcctgcaattttccccgtttataggcaatgcgttgggtgttgcaccacaaaccgagtttcccttccgtaattgatggccagtcgttttcttcccgacggaattcaatcagcctctcatacataatctgccagggctccagttctgccaatatctcttctatgcgcagccgtatgtctgataggaaacccgtcgtcaaaaaagaggtgtttccttcgaatcctttgggtgacggaaggagagatagacgctccaagtggggagccatcacatcataaaccgattttcctgaaagattgttgacaaaatccaagacgaccggccgttttccagcctcggcatttagacaacggcccaattgctgcaaggtaacgatatatgattctgtccgtctaaggaataagacagcatccacaccttccacatgcagtccttctatcagcatgttgacggaaaacaatacgtgcagccggtctgattcttctcggaaagcatccagtatccggccgttctgccgttcaccttgggcatgatggatctcgaacggagtaatggcacgtcccgctcgcgtgagccatccgcatacttctggcaccatctgcttcaaatcggtgagatcgcgacagaataccagcagcttgcgtacgcttgtcggcaggaacttccggatgacttccggtgcccccaaagcctctttgaaatccacacgtgccagatccagtttcttctgtaccttttcttttcgtccttttgaacaaccgctgcgttccagctttctttgcagccggtccagttcgttgtccagcccgtaagcactctgtaccagaaccggaaccggcaagatattgtaataccaagcctgcggcaaggtaagctcataaaacaaatttccttcgaaataaagatccaccgtatcgatcattccctccggacggatcggcgttgccgacgttcccaggacataggcacagggattattttctatcacatcctgcaaggcacttccccaaatttccgccccgaaatggtggaattcatcaataagaatatgatctgcccgtaacaacccattgtcctcccggttacggatcagtgactggaatgtccggtacgtcacttgcggaatagagaatccgacggctttccggatctcatccagaatcgtgatgttcggagcaaagaccaatatcttttcctttgcatgatctgcgatatagcgtgccagcaaataggatttccctgttccggtagcctgcacgaccgcaccgatacggtgttgtttgaatccccgcatgatcgccctgtaagccgcttcgttatgcggataaagctccacatgtcttccggacaagaggctttcaatatagctttcatccgaaacggtcagcccatgcagttcaaagtccaatgcttccggcaggaatccgccgtgtgccacgatcctgaaatatagatttcgatgccctttacttagtgtagagaacttctcgtagaacaattcagcatccgagcgagtcaaaggacgttcgtttcggacctccttcacgatggcatgtaccattcccggcttgaagcctatccgtagtccctcttcggattctgttacctggaagcctagacggagatagcaatctgttaaagacgataccatcctatttacttacaagtcaaaaagttcatttgattattgtcctttgctgtttaaagagggctatcatatcacccattgtcagtcgaccggtaatatcttctgttataatccggttcaaaagccgaagatccgcctcaatttggacacggaaacgacaggactcaggataatcatcccggattgtccttgctgtttcatcccaggaagaagctgacaagtgaagacgggaagaaaactccatacgctggttgtgccctttgtagatacggtaataaattgtaccacgctcgggatttttcttattaggttcaaaacggacaacaacagtaggcatccttgttacttttacagctgatttatatagaggagtttcccttataatcaaaatttgggtagggtgattttttcttaaaaacgctcaccaatctgagtattttccctgcattatttatatccgcactggaaatatggataaattcactcatactagtatatgctacccagaaataggagaaagtccaaacaataaaagttcccaaaaggaacacccatacgcaggaattttttcatttaccattccccttttcttcacactaaaatccagaatcatattgcagacggttgcggtcaaaatgcctctcatgcccgttctcttccgaagttagtggtgacaacatatagtaatccttgaatgttatacacccgtttgaaattagaaaccggacgaatctgcatcttcctcgttttccgcttataaagcagaatcatcatcaccttaaaaaatattaatagtctgattttcaggtttaatctcacatctttttatattctgtacagcaatgcgttcacaatacgtccacaagcaagcccgtctccataagggttcactgccttgctcattttttcataggcgactttatcgtcaatcaaaacagatacttcatttactattctgttataatccgtacctaccagttttaccgttcctgcatccaatgcttccggacgttccgttgtgtcgcgcatcaccaataccggcttacccagtcctggagcttcctcttgtatgccaccgctatcggttaatactatagtggatttttccattaaatagacaaaactcagatattctaaaggttcaatgaagaacatgttcccaaaatcggataattcctctccaaatacgtcatgtatcggtttgcgcacatttggattcaagtgcatcggataaacgaagtccacctccgggtatttttttgtcaagtctttgatagcagtacacatatggatgaatccgtcaccgaagttttcacgacgatgtcccgtaatcagcaccagcttcttaccaccattcaaacggctcacgtcatatccggcttttgccagtatccctaccaattcacaatccaacgccttgtcgctcttaattttatccactacccaataaagcgcatcaattaccgtattcccggtcacgatgacattccgatcgtcaataccttcccgcatcagattgctacgactcagtggcgtaggcgagaaatggtaggtcgccagtcgtccggtcaaaagtcgattcatctcctccggccatgggctatagatgttatgtgtacgtaatcctgcctctatgtgtgctaccggaatctgttggtagaaggccgacagagcagcggcagtagaagtggtcgtgtcaccgtgcaccagcactacatccggccttgcctctttcagtacatcacgcatacctgtcaatacacgggacgtcacgtcatataagtcttgtccctgcttcataatgttcaagtcataatctggacaaatatcgaatatatccaatacctggtccagcatttcccggtgttgtccggtaacacatactacagtttccacccgttctggctgtttctggaattctttcaccagcggagccatcttgattgcctccggacgggtgccgaagaccaacattactttcttcattgaattatatttttacatcagattgattttataaaatcgtaacagcgatatatctgtttgttaaaatcgaattcattttttgccatatccaggcagttcttcgatattgtgctgtattcttcgtcaggaaggttaatcaactcaataatattattgtgtaattgtttgaaatcatgtggctttgaaaccattccaaaataatatttcgatacgatctcagccccttctccacctccacaaaacagtataggtatgccaataggtatgagatcatatattttggatggcactgctcctttgattgctacggtaagtggaacaattgacgcatcgtatcttgacaactcttcggcgatttgttctttctttacatatccatgataatacacgaaacaaccgggatgtttatttatatattcttttatcttttctgtctgatttccaccaccatacaagtggaactcagcgccaatagactgaaacggaatattctcgataattgaatatatatcttgtgccacacctaatagtccggcatatacaatgcgaaagggcgtgtgcttccttttgggttgagcagcaaccgcatattgctgcaaattacggtatacaaacttgttttttgtcgaaggaaattgattcacatgccggattatctcttcagactgaccgaaaataccgtctgcattgcgataaatataacgttcaatccacgcgaaaatatcatatatcttcccaccttcacgcattgctccaagctcaacagcagaaagtggccataaatcggatatgttcacaagagtcttgcgcccgaatatttttttgaaaagcgtgatggccgaaccagccactggtagtggagggctttggatgatcaccctatcgtaaccctggatcttctttatcttaaaagcaaacaaccataacatggtcgcaaatgacatcatacttaccgctcgcttaaaaggattcttggacacggttgcataagtccaatatctatacacgtttatgccattaatcttttctttttttgacaaacggcctctataaccctcgaatatttgtccttgagggtaattcggcaaacaagttaacacatccacttccgctccctgacttttcagcccttcagccatattggttatacgggaaggagcagccccaagctcgggagaatagtagaacgacacaattaaaatcttcatattttatgcctgaaatatttgatacgttaaatttctgcaaaatactatttttatcgtcttagaaggttctagtcgattgtattctactgatacaaaatcatttataatttctatggaatttgcaccagatacagcgatattagccctgttggttcttatttcagttgacgatatggcaaggacctcaatatcgggtgcgaaatgaatatagctgatacattctgtcatattattgccgacaatcttatcatttattgtaaacacatcatcgttaatagtgaatttccgttgatgtatacatcctttaaaaccatcgtgctctgccataatttcattttcggtatcggatagtactcttactttagctcttttacccatacggaaacctccccacacctcgctagaatccttgttgccgacagttacggtgttatgagctgacgtacttcgttcgtactgccttcttgcagtcttgttgtaggtagaaatacctgtatcaacaacaaacggtctgcaatcaattcgcaattcataattaaacgtatcggcatgactatgccccggctgataggtcgcagtaatattacccacatccacaactgcctccaaatgtgttgaacaaagcttcctatagccacattctttcataggcaaaggggtccattccaacttcaatcttttggcgtatgctctcaattcggaaactgtcggtgctatcccatatgccgaatcattaagtaagggaatcgtatcgtctttccacacgatgctctccaaatgccccaacatccttaccacatacagtttcaaaagctcacacattttctcatgacctctattaatcgaggcattatagcaatccaataacctatcgagcaaaatgcagtgatacatcggtgattgctcgtaatgtgagccatcaggcaaaatctgttcatcaagctctttatacaacagacaggatgccttgtcatacatttttttatcggaaaaataaattgaagcgataaacaaagcgtaagcatcttctaaaagatggttgccaagcagttggtattccagtttccgttcgagcaatttacattgcgcataaagggaatcgttccaccgttgcaaccgattgctctccacttttttatgatgcctgccgataaacttgatccagttgatgcttcgcagtgcgataggataaggatcaagaccgatcctgtttgttggcaaatcagttataaaccgttcaacccattctgaaccttgttcaaaagtcatgtcaggttgcaacaaccaatccatataattcagattgtatgcccaaagcatcccatgactaacatcattccatgacttaaaatcccctataagatttaggaatgtaaatgtcttgggtacattgtaacaataccactttgcgataactgagaccatccgcaatgaagattgccggggaacattatattccatcaacttatgagaaaatagtctataatataattgataatagatttgttttaaccgaagatgtttaattgtattgacaataagaatattattagccatttgatttagtgcattataatttcaagtatgcgtttattcgtcttatcagattcaaactcttcttcaaatttcttcaaggcattccctgaatattgagaatagtttgttgcgttaatcgataagatagcttgttttatcgcatctacatcaccgggaattactaaacgaccattgtaaccgtcttctacgatttcaggtattccacctgcataggttgatacgcaaggaatgcctacagacatagcttcgatgataatgcccgggtagccctcgcgataagaaggtaatagcagtaaatcatattctactaaagtttttaaaacctgttcggaagagacaaccccatggtatgttattccgctttcgttgaagttgatattgcgatatttatcctcttttatctcaccatatatatcaagggtataattcgaaggtaacagtttggataccgctataagatcttctatccctttttctttgttgatatgcgacatgaaaacacatctgccatgaaagtctgaggggttctttcgtattgttgaagctttacgcacattagggaaccaatgtatattgtcactctttcctattaactgttgtaggtgtgtaataccctgttgggtttcaaagaatatcaagtctgtttgtctgatagcatcaagtgcccgttgtaattgggtttgaccaattttctttatgtagaactcaaatgaacctccgaatttacgtagtacgacttttttgtgtgccaaacgagctattttgctcaataatgggaaataataaattgtaccatgatcagaaaaattgaacattacaatatcgcacccaaacagtctccacaaaaatgccgggaaaaagtatgaataattgcgccacatactacgctggcgagtgcgaagatttgaataccggttgttttgtacaaacctatattcatattcagactgagaggctagatagtcaagatagtttttcatcaacaccgtcgcacctccataattcaataagttgctctcatcgggaattgagcctacaacgagtaattttttccgtttcatttctttattcctttctcgaaaagtcttacgtagttgcgagcacattcgtacatactgaatggaccataagtggcaagagctttttgcttcatgtctttaagctgtacatcggtgagggatagaaatctctttaccgttttgtaataagattcttcaccgataccgtcactcagaaaaccgttttcaccgttgtgtaccacatctactataccgcccacaggtgtgcataccggtatacagccaacaccaatagcctctatcaacgaaataggcatcccctcatacgaggaacaaagtgcataagcatctcccattttaaggtattcaagcggattgtgcagttctccaagtaattgtattgcttcatcgttgtacgaacgcaattccgcggtcatctgtgcatcacgttcacctccgataaacaatacagtgaggtcgtatccttcccgttttaaccgcattaccacacgtgccaagagagtttgccgtttcacagggtcaatacgtgcgagacttatcagtactcgcgtcttatttgtatgtctatactgtttaaattgttccttgacctcgtctgaaacaagcataccagcatccacattgcgcccattgaaaatcataggagcatccattccataatattttcggaagctatgtagtgattcggcggaaatggtaatgggtgtaatccacccatgatgaaaacagaacttccgcattccgctgctgataaaggagcctccggcttctttatcagcagcggaatgcactgtatgacagtgcataacgccattctttcgcatgattgcgaaagcaatatacataatagcacgcaaatgcgtgtgcaccacatcaggcttttctctacggatatatctatatactctaaataacaaaccgatgtcaagtcccatccgtttgttcatcgataccacccttacattattcgatacctctttcaaatagaaatccaccttgtcaagtgagtgcaaaaccatcaatgtcacatcatgttctttcgacaactcattgcacaagtcaaccacaaaccgctctccgccgccactgctaagttgaggaattatttctaagattttcattcagattgttttttaatttttttattgtgatcctaatacgtgtaaactaacgaaacatgtcagaaaaagacgtacccttcccataccaacctcttatagaaggcatagaaaagtttataacagataggaaggattgccaaaagcatcaagattcttttctcgcgtgtcatcttgaaattagaataataataacccacaacaatacaaagaggaaaatagctcatcattatgaaacgtataaagagccataccgaagtttcttggaagaaaaacagactggcaatataagttattgcataccaatagatgaacaatgcctttatataccgtggaacatccatttcttcaaaaactatcttcttagtcataagagccaaagatgcgtataccggcatataggttatcatttggttcagtttaccaaaaatattcgactgccgcattgtgccgctcgcatatcccgtcatcgagctccctatattcatgtctgctatatcaaaaccgatgagtccgttcataataatataatccagcagtaaagtagtcacaacggtcaggaaagggaatatgacaagactgatttttaccgttttcctattcagataaaaaggtgttaccgaaagtgcagcaatcgaaaacaacatacttttgtgaaagaagaatgaacagaaaatcaacaaacaaccgaataggaatgacaataacctattatgagagggcctgataatgaatgaaaagccaaaaaacagtatggcaattcccaaatttccgcgcattactgaaataatgttgatataaaacagcacaaatatcagcaatcctatcctcacatcaagtttgagccgttttattgtccataacgacaaaatcaccgttccgctccacactataaaccgccataccagatagtttgaagtgacattccgtatcaaccaatagtaaacgggttcaagatgcacgtttaatccggttgaacagatacgtttgaaaagcccctcgtagtgatagaaatcgttgtccgcatagccgaaagtgcaaaacagtatcagcaggacaccgtatactgcataatccaagatgtctgtatatcgttttctaaattcacagccatatctatacacattcggaaacggatacagcataagaaaaaacagaagtatattgaacagtaccggaactgcctcgtaatgatatttcatcgttgtaatttattaggtaaataaaataggacacattcatactaacacagaaatttggtgtatttgcatccggctataatcacacttgatacatagcagacgatgaaagtgcccacgaaggcgaccaacggagttaactctttggtatacaaaaataccccccccattctataatagataagtctcagaactatttcttgcatcacatatattcccatcgaattcattgcgatacttcggcatacagtgtatagttttccattgcatctgtcttccagttttataaatacagcgacatagataattgtgactaatccatagcttaccattttaagagtatggtggacaaacaggattaaaacttttactttcaagtccgatgccagttccggacgcatcccgtccattcccaaaaccaatgttaccgcaatgaataaccccatataaacagccgataaaatgcatattgttgaccaattgacagttctcagccgctcacgatttctaaagaaaattccaccaagatggaaaaaaagcagataataaagcgattgattaaaacggaacggaattcccggccaaggcagaatagcaataatcatgagtactaacatcaagttacgtcccttgagacagtgctgtatgccatattccattaaaaagcaccaaaagagcatcggaagaaaccaaagatgtccgtatcccccaataattttccaaaaatgttccagattaagaagttttgacggaccaaagaatatcaatgtcatgataatgccccaacacatacacggtacaaacagccgtttcagcttaccggctagtaataatcggaaagaaatgactttcttttggagcgaaaaggcaaatacatacccggaaatcaggacaaaagtttccagcatcccactgtatgccagttttcctccccaataaaatccttcattgggttgggcgtaggaaggcatatcccaaccaccgcaatagggcgcaagagcatgatagagcacgagcagaatgattacgaacgtcctgataatatctatttccttaagtctttccatatatttttaaggtatttgaatatgggatatacaccaagcaaagaaccgaaatactcgattttactgagagtacgcatcttgctgtgacgaatgactgtaatactgttgatttccggatatgtattgtgccaaatccgacggattcgcggcatcagcatatatctatcaagatacattcttgaaccaactttcagcgcatttatctcgtctgtatacttttcataaatacctttggagcgaagaaaggtgaaaatcagatcaagattctccttacgctgattgagtttattaatctggatctcagcactgccataacttgtaattgacgcaggattaaaaaaatagtaataaaatggtttcatcaagtatcctacattccggctattccaaaccaattggattatcgtcgccagatcctcgttcatattttgccttggaaatgttatcccatcgtaaagactacgtttgatcaaagcgccgcacaagctccccatcaaccgcccgcaaagcaatgatgacatcaggaagtctttattattggtagaaaccttgcgcggggcggaagcatatgtagaaacaccatcactacgatagaaatcataaaagaccatatcgtaatggccggatagggcaaaagtatatagttcctttatggcatgcacatccatccagtcatcgctatcgcaatgaaccgtgtaatcaccagaggccaattgaatcccttgtcgtcgaacagcgggcaggccgctgttcgacgacaacctctcaattcgtgtcagcctctttcgatgcggatatttttccagagttctctgcaagatctccaccgacttgtctggagaacaatcatccacaaagatgtattcaatgtcatcaaacgtttgggcgaacaacgattcagcgcaccgctcaatatattcctctactctataaatcggtacaatgattgatactttcggattatccatgatttttagctgtcagtttttttaattgttctattccaagggcaattaaataactcaatgttatgaagataacaaaagtgattaagtttgaaattacccccccccagttttgtgttataaaagctactgtttgttctgataaaatccctgaacaaccacagaaaaggagcgtgtatagccattatcgtgagtgaattagctcccaaagatgccaatattctgtttgtagttgttatcttgttgaaaggcttgaaattcaacaaaagatatatggcacagaaagctccggcatagaatataaacgggaaactggaaaatttcagttgcgaaatatcaaattgataatgtgccaaacggcagaacgctatggctatgatatatccggctatagcaataacggttgcttttttaattgccccctctgcttgtgtcagccctttgtcgttcatccatttgccgacagcatagaatggcaaagagaacagcccctgcccgatataaaacggcaaattgatcttggaatatgcgacagccagcccaattacaaaagaaacgataagaataacgtttttttccttaacggttttgtccaaaaaataatatatgacacatatataaaaaagagcgaccaagaaccacaacggaccatcaaatgcggcgatatgatggatgctcagtttatcaagcggtattccctgcaaccccatgctaaaataaaatacagcgaatatcagagaatattccccaaagggaataagcaaccgttttgctcttgattgaataaatccttgtttgggatgataaaacataccggccaaaaagaaaaacaaaggcatatggaaaatacaaatttcctttataaggattgcggtggcatgtccccaaacgacaaggattatgccgatgcctttaagtatgtctatacgaatgtccctttccattatttcaaaagtttaagttcctcttcctttcttctgcaagaaatacatccgcagcactataatctgcccaaagaacttctttgtatttttcctctttatctgtttcactgatagtacgtttctgcaaaccgatattatcgagaaaagtaatcatgcagttgtccttatctctattgacagcaaagaacggcatatgaaaaaacgagcgcatgaaacgaaccgccggtaacaaacattgcaatttgaccaaattaaggaattccaaaagccccgtaacaagctgctgtttaaaaggatacaaaccgcaacggagtgtattgtatactgttgccaccacctttattccctacattttattgtttttttaagaacatgaatttatttgttaccgtactgattacgaaccctctttctttagcatcaagtccgaatttatagataacaagtccggaaatgataagactggtcaatacgacaagtatatggctaccccagcttgaggttagaaatttatgcaaaaagaatgggaccggaatgatgcagaccgacacccaaagacacctaaacatcacttccacgacatacctcctaaccgggaaattcactttgtgtttgagatagaatattctgtaacagtgagtaatgaaattgatggcaattctgacaatcaccgcatagacgggactgcaaccgaacttgaacaatatatatataatcggaatattcataattatcatcgaagaaacggtaaactgatacttggctatattgcctattgtttcagatgacacccaaagacttccggataatgcatcaataagcaggaagatgagataaagctgaatgaactgtactgtatattgagggacacagacaagccataactcgacgacaggccgacaaatcaaaatcaacggataagcgacgaaaaagagcaggaaatacgagaattttgacgagcggaaaacaagttccagaaatctggatttatcccctgaaaaataggactggacaatctgtggctgcaccgctttctgaaagtttgtaaccaaagtattgacagcactgaacacttgcgaggctacccccattgccgcattgacagcaaccgtgaaaaaaatattcaaaagtattgatatgccttgtatggatgcgacatgggctataccgccgaaaaggctccatgaagaaaagaaaagcatttctttcagcagctttctgtcaaaatagaaccggaatctgcaagtcgtgaaattacgcttgcaataaatggcataaatgatattcaacaatatcccaacggtcataagggcaacggcgtacaacaccagacgattgtcttcagcccagaaaaggagaaatactgttcccaattttgccattacctcaatgatgctgacataagcgaaaaaagacatcctctcatatgcaataatgctcgactcatcaggaatcctgataaaatgaagacaagcggtcactacagaaatatggtacacaacccgtgctgcatcttgtgtttccggaggaatattcaattttgtttcaaagaaatagagccccacagtttccaatacgaagccgataaataccgctattgcaaaatgtatcagaagactcatggaataaaccctcgagactctgtcatgattgccttttcccaattccacgttcagaaaacgttgggtggcttttgtcattgcggaattaataaaagacagaagtgcgataaagccgccaacaacattgtatactccaaaatcgttctctcccaacacttccaatataatcctggaagtatatagagatacgggcatcattacgaatgtccgtatataaagcattaacgtgttgcgtgctatgcgtttgtttgatgactgcatttataactatcctacattttttaatctcaattgcaacctgaatgacaatagagtgtcaggggcaaatcaattggtctgatggtatatagaagctaacttttccacaccgtctgcaagcgtgaaccgactggatattacttttgattttctacccatcatttctcggacttcacgattattgacaagtatctcaatcctgtcagcaagcccttcaacattctctttttcaaaaagatatccgttttctccctcatgtacgatttcaggaatgcccccaactcgtgtaccaataacaggcaacgaatagtttagggcctccataatactaagagaaagtccttctgtacgggaaggctgcaagtaaatatcagaaatattcaaaatatcattaatgtcatttcgtattcccaaagacataatctttctattcaatccggcctcggcaatcaattgcctcaagctattactgtcttcagaattttcgctaattccgatgacaagcactattatatcgtttttaagtctgttggagtccatcagactctgaatacttttgacaagtatatcgaatcccttgatacgaatattgaatccgattgtagtcaacacgactaccccctttggtatgtccaatgtttttttcagatttgggttgacaatcttttttttccggactcccaagtataggacttcactctttgaagaaaaacctacgccttcaatcatttctttctttacgccacaactgacacaaaggaatctttcaaaaggaaaaaaacagaacttcagatataattttttaagtttgttggaaacaaagatttcactatgacgggttgaaataatccgaatccggggaaacagaattcgcaagaatggtgcaataagataacttccaaaatgaaaatgaacaatgtctattttctcacgtttgatgacacctatcacaaatttgaaatattgaaatgtggaaatgctttgtttacaaagtattaccccccccacttattgatgtcatttacatagttttcactgattggcatcgactcgtatacaaaaataaatttatcaacacggcatatcttgaccaattcagcgaagtaggattctactccgccgtatttagtcgatttcatacctgtcagttctaaaatattcatatattcactattttttaaatattccacaaaagtccaatatcaccttatcctctcgccattctaattctttgaacggagtgtgtgctgtaaggaataccacgatgtccgccttgtcgtaggcttctttgtaatctgttaacttgaacacatggtgctcctttacattgggttccacaaccaggatattggcattattgcaactctgcatcactttcgtggtaatatattttgcaggactctcgcgcaaatcgtcgatattcggtttgaaagccaaccccatcatggcaacgcacggtttccgatgatgtttcagttcaaattccagcatggcatttttcactttttctgcgcaccaaaaacttttgtagttgttaatttcacgggcatcggcaatcaatttactctctgctggaaaatcagcagtgataaaataagggtcaatagctatacaatgacctcccacgccacaaccaggctgcaagatgctaacccgcggatgtttgttggcaagattgataagttcccacacattgataccggccttgtcacaaatcaaggaaagttcattcgcaaaggctatttgtacatcccgactggaattctccgtcagtttgcacatttcagcagtacgacagttggttctatgaagtgttccctgcacgaattgagaataaaatccaatggccttatcggtagattcaggatttaaaccgcctatgacccggtcgttatgtatcagttcgtaaatcacattgcccggcaatacacgttcgggacaataagccacataaatcctatcttccaattcaggacgttcgctgaaaatgaggcgggccatcgcttcggtggtgcctacgggtgaagtggactcgatgacataaaggtcgccttcctttaataatggcaatacggcacgtgtagcggcttccacataactaacgtccggttcatgatttcctttgaacggggtgggaactaccataaaataagcatcgctcacctccggctttatggaagctttcaacgagccggcattcaccacctcctgcaacatctcctccatacccggctcaatgatatgcagatgtcctgcattcgtcatatccactacctgggggttaatatcaactcctgtaatctgaatgccgtgcttggcggcgataatggctgtgggcaatccgatataccccaagcccataaaacaagctttcattatcaatctgttatataagttattaatcttttaaaatttctttccgagtacaattgaacagaatgtgttcaacagaattttaaagtcgaaccaccatgagcgatgtcctaaataataaaggtcatattccaaacgtcggagcatcttctccatcgtatccgtatagccgttatatagtgtggcatatgatgttacgcccggacggatttggtaaagataagtatatcgcttgtcgtgttcaagtatctggtcgatataaaacttacgctccggacgtggaccgatgaatgccatatcgccacgcagaacattgtagagttggggtaattcatccaaatggtgcgcccggatgaaacgaccggtcttagtcaatcgggaatcattttcacccccggtatgactaagctgcggtccgaacttctcggcatccagacgcatggagcggaatttgtatatgtagaacgggcgcccgaatctgccgatacgttcttgcttgaagatgacacttcctccatcttccctgcgaatggcaatgtagcaaaacaagaatagcggagaaaaaatgatcaatgcaatcaatgacaggataaaatcaccgatacgctttacattgcgcgcaaatgcggacattccatcgggaatgaaactgtcccgtggcacatattggctgacatgtgtggtgacaattattgcatcatcattcgggtcatcctttttcagcttatgcaaccacttctgataagcattaaaatttattgtatctgccatttttaactttatataggtctcagtttgtgaacctacctcaacagaaccttgcaacaatgaaacaagggattctccggatgtaaccgtacacggcatctgaagacagtctgagtaactacgaaaattcatgtagccttgttgtttatcaaaaagacgtaaaccgtatgcggaataaccgtatgcacaccatgcaccgatctgtttattccgatacaagtggatataagaaccatcattttgattttcgttttcccttataagatgaacattcataaaagtatattgtttataatttatcgtaagcacaaagcactatacatttgactaataatcaagaggttttctgatcgcatctattctatttcacctaagacatacttgtgggggcatgacgaagaagttccattcctcacacgaaggacaacagaatctttgatagaggaacaatcgtgattatcgtcaatgttgttaatgcagcttcgtatccgaccactgtctggaccaaagccatagctgttatggcatgagccgtagtgaaaccatgcataacaacattggatataaaaatatcagtgtcttttattctaagattaaagattataccaaatcctgttgattgtacaagtcttgttgcaatttagtcaacggacgtagatgaatgtccgtttcattctccagaaaaccaaaaatgatacgtttctgaagggaaggagttatggtcatcccatcgtattgattttccatcatcttcatatagctcttatcccatgccttacgtttccagataatttcttccgccacttccattcttgccgacaatggcacttattgtcacccccgcagcaaagaaattcctttcaagcgacctgcactcatcaccatagccattgaactgatattgttcaccttgtttcaagatgcgcagtacgttcctgttccagcggtcatcctttcggattacaaggctcgtcaatgcaaaatttgcaatcattgatcactttgtttctgtaaggttccaatgacttccgattttactgccgaagcgaccaatgtcttgtaacagcctatggcatggatgtcacaaccggtacggtcgtacattccggctttcagcagggcttcggccttttcctgtacatgttttccgtacattccggccaacgagggcaaattgagttggaaggagacatgctcttccttcaaggcctgataatccctcttctgcatatattcataccgttccgaatgtgcaagcaacgggtaataacctttcttttggatgcgttgcaggacagagagcagttccattggtggattgaaataggaggtttccaccaacaggtaacgtttcccctcctctaggggcagcaggtcatctttttccagccgttcctcaaagagattgtccatcatgtattccgcagccaaggcaagttccagtgtgccgttataactccgtttcaattcttggaacttttcctgcaaggtcacagtttcattagggatgtcctccatgatgtgcggcgtgagccatacctttctgactccatgcttttccatcatatctagaattcggagtgattcatccaatgttcccactccgtcatccactcccggaaggagatggctgtgacagtcggtcattcctttcaggataccgctccgggcgaaggttattgtcttacgaaagggccacatgatagttgagttaaaattaaaagttcttacgagaacgataacatgcaaaatcaatcacttgatgaccatccatttaccccccccccatttttcctttatttccataataggaagagtagccgttgcgatagccatatctatagccatagcggcctccggcactttctgtaccgttcagtatcacgctgaggttcttgaaacgtttctcctggtaaatattttctagttcgggcagcatgctacggtccaataaaccgctgcggactacaaagacggtgcggtcagccagtttctcgatgatctgcgcatcggccacgatatcgataggcggacagtcaataaagatatagtcatactcgctgcgaagcacctctatcaaagtggccagcttgccgtcctccaacagttccgtcgggtttgggggaacagtaccgataggaatgatatgcaggttgtcgtatttttcatccttcacgataatctccttccagtcactgacacggttgcccagataatcacttaaaccagtcttcggggaatccacgtaggaggaggtggagccgtgacgcaggtcaccgtctatcaccaatattctctttttcttgatggcaaagctcatggcaatgttcatggcaaggaacgacttgccgctgccaggattaaacgaggtaagcatgaacacgttctgaccgctgtccttgcctgccataaagtcaatattggaacgtaacacgcggaacgcttcattgataatgttacggttgccttccttcaccacgatggctttcatgacagactgtgtgtgtttatcgaatcccaatttcttcttagcactgagatattgggggatctcaccgatgaacggaatgcttaggttttccagatcctttcgcccgcgcaccttggtattcatgttttccttcatgaaaataatcaccgccggaacaagcagaccgatggcgaatgccaccaaaaggatattcatctttcggggggctgtgggaagcatgctgcctctcggagcggtaatcacacgtgtattgtaggcggtgaaagcctgtgaaagctcgttctcctcacgtttctggagcagataaagatacagttcctccttcaccttctgctggcgttccacagaaagcagatatttcgcctggttcgggttggaagccagttggctggtggtcgtggcttcctgttggcggatgttgcgtatttgggtattgagcgaaacaatcaggttgtccaccgactgaatgatggtacgctgcatgctttgcagtgagttagccatgtcttttgccagagggttcttctcgctactgttggcgatcaggcggttacgttcgagcacgatcgtgttatattcaccgatctggctctcaatattgacattagcgataccggagttggtgggtaacagctggctgagtttcttgttgttcaactctttccggatatactgtgcggtggaaagctggctgttgagtgccagcaactccttcttgttctcggcggactgggacaggtagaggctggatgccgcctgcacatccggcagcaggtgctcactcttgtaaccggcgatgttctcatctacattgcccagctcgttttcgatcacgctcagacggtcaccgatgaactgcgaagtactgacggcgatctggttcttgtcctgaatccatttctcgttgtacatttcaatcagggtgttcagaatgtcttcagccttctgaatggaggcatcgttgatactcagattgataatggtggcatcctcgtttcccaattccgcatgcaaagcggctgtataataatcggtgacggcacacacattaccttttctataacgtatggaagtgcccacgaatgaatcgttccaatattttgtgaaattgatgacaagtgtgcctatttcagtacggatggaatcgcccatctttccggagaaatcttccccaaacgctttcccgtttacttccatgtcggatatgacaaacgtttctttggatgaaatatctattgtaaaaccgacaggagtttcatccaagtggcgataggtgactgctaaaggcgaacttttgtataattccacatctttcagtcctttgcggacagtataggtctcgtttaatcccaaccgctgtaccacctcggtcatcagcgtgggcgatttcagggtgagcaactcattgttgatattggtattcgacttgaagatacccaagtcagaaaattcactgaccacattggtggatgttcctcccttggaatcatctttcaccaaaatggcagcggtacgggtgtaaatgttcggggtgcccagcaggtacaaggcggctgtcgccagggttacgaacagggagagggcaaaccagtgccaccggggcatgaaaatcccccacaggtcttgtatgcgtatgaagtcgtcagcaggcttgctggcggttgttttcttttctgtcatattataaaaatataaagtgattccttttctgaaggttacttgaatattagcacacccaacgaagtgaggaatgaagcgacgctgatccatagcgatacggacttcacgttattctcgttgatggtgctctgaccggcacgcatcttattgggctgcacataaatcacatcgttttgcttcaaatagtagaccggagatttaaaaatgtccttactacgaagatctacccagtgggtgacacgctcaccgttttcctcgcggatgacaaagatagcatcacgtttaccggtaatggtcaagtcgcccgccatgctgatggcttcaagcaaagtgatctggtctttggttatgttgtacttgccgggggtttttacctcacctaacacggagaaatagagattcatgaactctacggtcactaccggatctttcaccaagtcctcttccatcagccgtttcttgataagggcggcaatctggcttttggtcataccggcaatatgaagcgtaccaatgaccggaaagtctatgtttcccttgtcatcgagcgtgtaaccggatatttcaccattattgttgctactacgtaaatcggcagttcctgcccgatactggacacgtgtcaggttgaacaacgctgccaactgcgggtctttactggataccatgatggaaatttggtccttgggctgcacggtgatgtctcttgcacccacaatcgcttcaggctgattcacagcaatgtcttgaaagtaaagaatctccttcgaagtgtgacaggatgtaaacaacactatcgcaaagagataaatcaaaaatcgattcttcatatttatatctgtacagtttatattatttctaatttgtaatttcaattaatttttatcgtgatttttgcgaagtcccgtaaaagccagcggttttaggaaagaacttcaatcagatcggggtgcacctcagcggaaacggccatgacaccctccaataggacaaccaccctacggtttctcttgccctgcacccgcacaaacatgcccttcacgttatcgaacttgccaccgtggatacatacacgcattcctcttttcaagtctatttcttcgggcctataataaacagtgtcctcctcataatgagaagctatcttgatgaagctgtccatctggtcatccggtacggtaatatattccgcccccgtgctcttttcccacatggcgaattgcaagaaattgtatcgtttcttgaattcagtgatctgcgaatggctggcgtggacgaaaagcagactcggtataaccggcaccaacttttttgacttcactccatgataagttcttacggcataatgtttcgggataaaatattccaaaccatattccttgtctttcagcctgtcctctgccattttctcattcttgtaggcgcgcatgacgaaccatcggacctgccttttttcctccgctgtaaaaagactcgtactcatattccgaaacattttataggtgtggatataaacctagttcatgccaacctacatattggcatgtattacaatggattacgttcccttttcccataatatccattgttagttccatacttttgacaaagtgtacagacctcatttccggggcttccgtcactacttctcttggcaagagaaatattacaatgtgcaaagttatgtaaaatattgaagaaacgatagaaaacaggtgataaaatataaccaaaacattcatacagagtgtatttgcttaacatatattggataaacgccacaatgccacttcgcttttctacttgtctatcaattaattacataaaatatggtcctctaatatttctcttgccaagaaaatgagccgtatgctcaacaatttttattatattacaaaatgctttcaaaaacctttcaaacgcatctggttttaaattgtcaataagaacatttccaacagtattctgccactgtattcatagatcttttccggtacttttctttttaagagaaataccggaaagggatagttctgataatcagatgctatatatggaacctgacaaggatttgtttgacaattaaaccggaatttgaaacattttctttcgaagaaaactgttttttatcatacaggtggatattttcctatattttacctatctttgcaatgtctaatatttctcttaaaaagagaagcaggatcggtatagccttttattcagtattctgcgtgtcgcatttgttcccgttataaagatttaagtatgatgtcatttgctttgtctacctgtgaggtgtccagtgaggcgaggtagattttggtcgtgttctccgaatcatgtcccatcgcctcgctgatggttgccagcgggacatttttgcttctggcaatactcgcccaggcatggcgcgctacatacatcgtgagcggcatgccgagcccgagccgtttcccaagttctttgagtttcccgttgatgaaatgcgctgtgctcctgtactgccgcacggcatccttagccgtatctttgatgaccggaaaaaggtaggggctgtcattgtggccatacctgtccagtatctcctgcatgggtttctcccatttaatggacagacgccgtccggttttctgcctgcggtaggttagcacaccgctcttcagatcagcttttttcaggtaggcaatgtcaacgaacgacatgccacgggtataaaagctcagcatgaacatgtccctggcgtattccatgcccggggaaatgcgaaggtccagatcgcgtatcatgcggatcactttcaacggaacagcacgttttacggtcttgtctatcccggtgtagacatgtttgaaagggctgcgctgtatcgtcagttccttgtccaccgcacggttgtagacggcacgcaggttccgcatataataggaggtgctgttcggacatatccccttgtccttcagccatgcctcgtattccagcatgagggtggagccgatatcctccagcgggatgtcgccgtccctgccccgaaagcgcgtgaagctgttcagtacggtggtgtacctctcggcggtgcgcttcttgccgacacgctccagttcctccacgagcctctttccgaaggccatgaaattatggctgtcctcagggggcgggttgtgaaaaagttcgacaaccctgccggcgggataggtaccgccggaacgttccagtccggcaatgatactttccagacggcggatgtctttttccatccgctcctttaacgcaagcagaaggcttcttctggcatcaccggataccggcagtatgatttccgacatgcgtccgtcccattccgaagggaacagcctgtagccggtgtttatctggcgcgccacccttccgtggatgatctggaaatagagcgtcccctccctgccttccacggacgaggacctgaatttggttttgattgttgccatagtgcagtcattttgaattaggattgtccacttgcttcctgatttcctgtgcctccctgaacagccggtgcgccagactgtccttgtaggccgccatttcatgattacggatgcggttcctgaccgagtcctcaaaagcggtcaccagcctttccacacgccggatcttttcctcgtcccgctcgatggtgaaatgcttctccaggaaggcgatgtcgggatcatcccccggcaggcagatcctgatggcacggtatttcaaatcggcatccttcaaaagccggttcgtgcggtactggttacagttggtccagacggaaacgaccagtgccaggatcagtgctgaagctgtcgttaccaccgccttggatgcgctttccagacggtaggtcaccagtttgtgtaccggttcctttttcaacaggaccattctctcatccagccgtcttaccgtttcctttaccgcctggctgtcctgccgcaggctgtcccttgtcttttccatttctccggcaaacgtttcggcagacaacggccagccttccgacaaccggacggtatggttacgtaccgctgctatttccaagccgtttttctccaccgcggattgcaggcgttccagacggattttcagttccgcaatcccttccggggaactggtccggtttccaactgcggggcttgtgccttccacgggcagcgtctccactttcttctcgatcctttcaaggcatccgtagatgccttccagataattttcctctttcatctttcaaagtttttttgttatacatatggttcacaaactccttcctttcctgcgcttcttctttctccgcaggcgttccgcctctttctcgtcctccgtcggtgccaccgacggcatgaacacgccacccgtaccggtgacttcgaccaggttatcaataacagaaccatgactttgttcatggtacggttgcttttgggaaacgtcattttccagggacgtgacatggttatggtccaatgccgcatccagccttgaccagctgaaactgcggtcaatcccacttcccttgaatgacagaccgttctttataaagcggatgccctgcacttcattagtgttttccttgtacttgaattccatttccacgcccatttttaagagcttattttgaaattctttccatgtatctgcactcctcaaagcttccttgaccgcacggtatatttcgtatttcaccttttcggaagcatgcagcttttccgttttaacggactgtttgccttcggaataggtgagcgaatacttgtccttaagcatttttgtcactttctcgttgcgcttgaaatcgttgctgtcggaaatcaccttcccgtcgaagttcacccggttgaagacgatgtggcagtgcgggttgtccgtcccgtgatgcctcaccacgatgaactgcgtgttccgtatccccatcagctccaggtattcctccgccagccttgccatgaacgcgtcggtcagcctcggtgcgtcctccggcttgaagctgagcgcaatgtgccccaccggtttcgccacgtccggattcagcaggcattgccaccggaaactgcgtgccgtctcctccaccgttcccagcagcacgccttccgaggcgatgatttttgcgtcgtccttctgcgtcacgtagcgtatgcagccgctgaacgagcggcctttcctgatcttccctatcatgaggctatcctcctttcggcctgtaatcatccatgatccgcttcagctttcccagcagcccctctatcagcagccttgtcctgtaaaagccggtctggtgcgagagctttgtcagctggttcaggttgttcgccattcccgccaggctgcgcaacagtgcgttctcctccggtgtatgccttgccgtaacggtggccgccagtgctgcctccctgatatagaccgccagactccggccggacttccctgccctgaacctgagagcctcgtagctgacgggggagaacttcaccgtcacgcctctggtcaatttacgcgtcctgcccagtgccggacggccacattttttcttcatcccattcacatcgtttgtcatatgttttttctttttcgtccgtacttctttcattccaaaatctgcgaccggcgggagcggatttgccctcccagcaaccgccgggcgcggggagcaagggttttcgggaatccggaaacatacccttgctccccccacagaaaaatcccccccccgcattttccacattgaagcgggtatacagggaacagtgcatacatcgggtatactccacgcccggtaacaggctgtcagatttttctccactgctcgatgtccccacggtaggcggcaagatgctccctggcaaggttctccagcagtccggaaacgctcatgccacgcccgccgagcctgcggacgacggcgtccagttcgtccctcacatcctcactgacgaacaccgtcttgcggttcctgatcttcgggacggtgaggtacgtttcccggtactcctccagcgaggccctgcgttgcctgccgctcgttcttcttctcacggggtcttccggttccggcggggtgtcctttcttctcgcctccccggatacctcctccgcaacgagcccggatggaatcatcgattccgtcacggaagcatccgtaccggcggattcccccggaccgggttccatcatgagtctttcccaccactcgtcgtggccggctccgggactacggccgttctttctgtctgcggtttcggataccgccattttcttccctttcgttttttcagtcggttcacttttcattgtacatggattttagatggttgatactgtgggcacggtctacccgtttgcccgattgtcggaagcaaataaaacgataataacaagtgctgtgaaacggacgggtccgattggcggggtttgccgtgttattcatattgttggatcagtctgacggtgatgacttcacaaatatacgcccgtgcgcccagaatggtcgcttaataaatacttctttagcaagaagttaggattgggttcgatatagtcctatcgtcaatcagtttatccaaaagggaaacccgatggagagtgtagcatactgattaaagctccaagtccactaatagtcaggtggcgactgaggggcaagacgaaaagacatacataaggatgaagccttgattggttgaatgatagttcagtggtaccaaatcttgcaacaacggaagactattatacatacgttgtttcatagtactctgcctattttgtgcgttagtgcagagcataaagaaccgactatgacacagccgcaataagcggacaagaacgaaagtcacatccgacagtatgtcgtgctaatagttattaagagaactaactggggattacctaagtcggaacgctggaacaaacagctataaagaaagcttttgaatatccgatatggtaacggaacttccgtagtagtctgagcaagggaaagccttgtacatggcgaagggaagtagtctgtaactttaatacaaacaacggaaaacgtgagagacgtatgagaaatccagagcaagtattaaacattttagctggacacagcaatgagcccgagtataaatacgaaaggctttaccgtattctattcaatgaacagatgttctttgtcgcctaccaacgtatgtatgcaaagccgggcaacatgacacccggcacagatggcaaaactgaggatgaaatgagcattgataggataaacaaactcatagagagtataaaggatgagacttatagtcccaatcctgcaaagagaacttacattccgaaaaagaatgggaagatgcgtccgctaggaataccgtcttttgaagacaaattggttcaagaggtagtaagaatggtgcttgaagccatatatgagggacactttgagtggacatcgcacggtttcagacccaaccgaagctgccacacagcactgaaaagtctacaaaacaatttcaacggtgcaaaatggttcattgagggagatataaaaggcttctttgacaacatagaccataatgtgctgatagaaataatgaaaggcagaatagcagacgacagatttcttcgtctgatacggaaattcctcaatgcagggtacatggaagagtggcaattcaacaagacttattcagggacaccgcaaggtggtatcataagccctattttggcaaacatatacctagacaagttcgataagtacatggatgaatatgccaacaaattcaataaagggacagcaagaagccgcaacaaggatatttgcaaactcaacagcagagtacactacctaaaacgtaggataaatgaagtagaggatgtaaacgtaagaacaaggatggtagaagaactgcacgaaaagcagaagctgatacttacaatgccaagtggcaatgatatggatgtaaactttcgcaggttgaaatacgtgcgctatgccgatgatttccttatcggagttatcggaacgaaaaacgaatgtgagacaatcaaagctgacatcactaagtttatgcaggaaaagttaaggctggagatgtcacaggaaaagactttgattacaaatgcacaagacagcgcaaaatttttgggttacgaaatatatgtccgtaaagactatgccacaaagagaaacagtaacggaacagtgcgcagatacttcaacgggaatgtgatactacacgtttcaagagaagtaatcaagaacaagctgctcagcctcgaagccatgaaagttgtcaccaaacacggcaaggagacatgggtgtcaaaaggcaggacttatatgattgacaatgaagcgcacgagattgtatctcagtttaataccgaaatacgagggttctacaactattactcaatagcaaacaatgcatcggctttgggacgctctttcggctgtattatgaagttctccatgtacaaaactcttgctcaaaagctgaatatgtcagtgagaaaagtcattgaaagataccgcaaggacaatctctttgcagtgccttttgtaaacaagggaggagaaaccaagtacagggtattctataatgagggatatgcccgcaaaacggattgtgaaacagccccaagtgacaatctgccgtacatgttcaaaacgccatcgttgagtctgatagaaaggcttacaacaaaaacgtgcgaactatgtggcaagcacggagaagtggtaatgcaccatgttcgcacactcaaagagttaaaaggtaaaaatgactgggaacgcaaaatgctctacatgcacagaaagactttggttgtatgtgcggagtgtaacgcaaaaatccagagatgtgtcaagtaagatgatgttacagatggagagccgtatacatggagacgtgtaagtacggttcgggggcaggtaagcgaaaacctaccgctgtaaagcggaaaggcgttgtttgccgagcctaccggaaatttcccactcttcgggaacggatctgaacgtctgtttactaaaagcaaatgaatattaaaatccgatttccatgacatctgatgacatataatgacatctgatgaaggggcggaaccatatccgggaacaatcatttactttgcagatgaaacaagtacgcatatggtgtcaaaggtagtcatcctgtcttgaaattcaggacgttccgccgggattcactaaattgcggaacggaatccggatccgaaaagagaatgaaacagatgtcaaacctgaaattacagtgattatggaaatagtgaacattgaggcaaggaccttcgaggcgatgctctcggccttccggacgtttgcggaccggctggacaccctctgccggctgtacggcgacatggaggagaagaaatggctggacaaccaggaggtgtgcctgctgctgaaggtcagcccgagaaccctgcagaccctccgtgacaacggcacgctggcatacacacagatctgccacaagacatattacaagcccggggacgtggaaagtatcatccggatagtggaggagcgccgcaagcgggctgaaagtatgggaaggtcgatctgaaaggccatgaaaaacgaatgtcgaacaaaaaaaagatcaagtcatgatgaataccgataaccgtctgctcacccgtgagagcagcgagcatataagagagttcttctccaccgtcgaacgtctctccgtttccatggagcgtctctttgccggcaggtcaccggcgatggcgggcgagaacttctatacggaccgcgaactggctgaaaagctgaaagtgagccgccgcagcctgcaacagtaccgtgacagcggtctgcttgccttcacccggctgggcggcaagatactgtaccgttcttccgacatcgagaagctgcttgacggctgctaccgggaggcgagaaccaggccggaggaactttagaaaagttccgtacgggatcgtgaatgaaggggcggtcggttgtcataccggtcgctccttcattttctttccaccggatgaacgactttaatttgctcgtaaaatacttatacacagagtgttttttctttatgaattatgatccggtgacaacattggcataacatggcgggacatggaaacatttttccgatatggcaataagatacggggattccattataaaaaaagactcttattttattatgtcattatgttattctgaaattggggcgggccgttcgtgtaccggtgggacgatccgtttccgtaatggcggcacattccgtactggtatcattatcctccggcaatgccgtttcccggtcttttcggagtgaccttatgccggccggtgacaaccgcatgtccgtgtgtaaacatggcggcgcataaaaacaggcacatcctccgggctcctgtcccgtcggatgcacctgtctccgtcatgtcatatacagccggactcctccggcccatgcctctatctgagtatcggattcgagagcagtatcttgtaataggccactccgccaatctctaccggcatcctcgccatcatgaactgcacgctcttcctctccaccttcgcctgccgcatgagtctctgcacgataaaccccgccgagaaccttgcgcatcttttatccttccagacaatgaacccctcgctgtcatcggcccggcagatgtaccagtcatccgtctcgtcgtcgtgggcgaagttcacccgtccgccaccgaggattcccaattcgattgacatcgtctttgacagatagacggtccccctgctgtcaaggttgatggtccgctttcccttgtatgtgacttcctgcggacgggagttttccctgttgtatactatcagtgccataactttcttacttttccgttaaacaattttttcaatacatgaagctttccaccgccagcatctgacttctccatgcgaaaccgctgtgggtacgtaccgcgtccactatcctgcatactttctgcgatatggccgatgccgagatacccatgcattccgccagtgccttgaacgagaactgcgcctcatagaacctgagcatgaacatccggtactcctcgtaggagaacttctgccttacgaaactcagtatgtctcttaccagccgctcgcacccgttcaggtcgtcctcggaaaggaattttgcctcttcgccacatcggaggaagaaatcatcttcagggtgtgcataccgattctcccttttaatctttaccagggccgcctttttgtagcatccgatgaaatacgcgtcatagtccgttatgtcctttccgggaaccagcacctgccttcttacaaaaaggtaggtgtcatggaaattgtcctcgtccagcattccgtaccggcgtaacgtccctctcaacctgtcataggatgcagtgaaccactcgttgaacagtctttccttttctgcgctcttgtctgccatagctttatatttttttgagttatacatggcctacacgggtaggcattcttatttcttgtgcttcctccagtttgtttttcggcggtctccggcaaggcttgccgtgaaaaaatacgctcacgcgaagcgtgaggaagattttttcacgtgcaaccagcccgaagggccgccttgcgggaccggcctgaaaaacaactatttttgccgcaagaaatgaggatgacggattccttctgtctattgcctgtccggtgagaatctaaaataccatgcagcttttctgtcttcggcatacttggagaaatattcaaggatatggaatgagaacggcaatacgtgatattgcagaaggagcggaaatgggattggaaacaggaagcatgtccgggctttcatgcggtttatacggcagtgttgattttggggaggattacagggaagtgacaggaaggttagccgttccggagaaattgtatgtgtacgtttgttccttctggaatacggagtcttttaaaatcatggaagacctcattcgggaatgtgttccgaacaataccccgccacggaacggttatgacacttgatatcaggctgtaagccgttccgtagcttcagtatcccatatcccatgcatgaatgtggatcaggcggcatttcacctccttgccccgtttacggacatgccgatgcgttgcctgccggaattctcattcaagcagttttcgtccgccatcatcttccaacacacgcatttgctggatggctatccggttcagtctcacgagccgttcgccttgcggtatgccctggtctatgaatacggcgttcaggttttccatattggagaggcagatcagttcattgatggaggcatagtcacggatattgcccttcagaccgggattctgctcacgccacatcctggcggtcatcccgaacatggctacgttgagcacgtccgcctcttccgcatagatgacgccggcctgtgcgggggtgacttccaccggtatcaggttctgcctgatggcatcggtatgtatgcggtagttgatctttgacagttcccgtttcgcactccagccgagctgggcctgttcctcctctttcaaccgctggaactctttcagcaggtacagcttgaattgaggggatacccacgtggcgaactcgaacgcgatatccttgtgtgcgtaagtccctccatagcgtccggccttggcgatgatacctttggagttggtcttttccacccattgtttgacggaaaggatgaaacggttcaatccggcctcgtttttaattccctcgaattcgggggaattaaaatccggattgtacatctcctcccatatgcccagaaactcgacggtattcttgttacgcaaccacttttcaataagggcgggaccgttttccatattgcggaccatgtcggtcagggagatataatccttgtcattgtacgtgatgactgtcacttctgtattttggactttaattttagccatgttcttttaacggttattcggttattattggttcgatgtacaaatgtacggtgtattttccggaatggtcctccatatccggaaaagtttgtgtcacgccgcctgttgcgacaagccgtttctaccaaggaaagggcaggcaataccggctgacgtggatacaggcggaacaactcgcatatgcaatgcagagggagcaggagagccttcaccacagccggagaggaaagcggtctcatgccggggtacggcatgaaaaggggctcccggacagttcttttccttgtcgcacatgcactacgtcggtcgcagttttcgccttctgaatcccttttacgtccgtccctgcgctttcggagcgtttttccggtagaaaatttcaccatgcggaaattttctaccggaaaccgaagggaaaacgcggagtcccgcagggacggacgaactttgatgaggaaggggaaaatcgtccgtttcataaataccatttcctcagatggcatcgcatatttccttctccatcttttccagcttatgggacaggatttccatgtcgctgctgatcttctggttggttatccgtaggctcggcaaacaacgcctttccgctttacagcggtaggttttcgcttacctgcccccgaaccgtacttacacgtctccatgtatacggctctccatctgtaacatcatcttacttgacacatctctggatttttgcgttacactccgcacatacaaccaaagtctttctgtgcatgtagagcattttgcgttcccagtcatttttaccttttaactctttgagtgtgcgaacatggtgcattaccacttctccgtgcttgccacatagttcgcacgtttttgttgtaagcctttctatcagactcaacgatggcgttttgaacatgtacggcagattgtcacttggggctgtttcacaatccgttttgcgggcatatccctcattatagaataccctgtacttggtttctcctcccttgtttacaaaaggcactgcaaagagattgtccttgcggtatctttcaatgacttttctcactgacatattcagcttttgagcaagagttttgtacatggagaacttcataatacagccgaaagagcgtcccaaagccgatgcattgtttgctattgagtaatagttgtagaaccctcgtatttcggtattaaactgagatacaatctcgtgcgcttcattgtcaatcatataagtcctgccttttgacacccatgtctccttgccgtgtttggtgacaactttcatggcttcgaggctgagcagcttgttcttgattacttctcttgaaacgtgtagtatcacattcccgttgaagtatctgcgcactgttccgttactgtttctctttgtggcatagtctttacggacatatatttcgtaacccaaaaattttgcgctgtcttgtgcatttgtaatcaaagtcttttcctgtgacatctccagccttaacttttcctgcataaacttagtgatgtcagctttgattgtctcacattcgtttttcgttccgataactccgataaggaaatcatcggcatagcgcacgtatttcaacctgcgaaagtttacatccatatcattgccacttggcattgtaagtatcagcttctgcttttcgtgcagttcttctaccatccttgttcttacgtttacatcctctacttcatttatcctacgttttaggtagtgtactctgctgttgagtttgcaaatatccttgttgcggcttcttgctgtccctttattgaatttgttggcatattcatccatgtacttatcgaacttgtctaggtatatgtttgccaaaatagggcttatgataccaccttgcggtgtccctgaataagtcttgttgaattgccactcttccatgtaccctgcattgaggaatttccgtatcagacgaagaaatctgtcgtctgctattctgcctttcattatttctatcagcacattatggtctatgttgtcaaagaagccttttatatctccctcaatgaaccattttgcaccgttgaaattgttttgtagacttttcagtgctgtgtggcagcttcggttgggtctgaaaccgtgcgatgtccactcaaagtgtccctcatatatggcttcaagcaccattcttactacctcttgaaccaatttgtcttcaaaagacggtattcctagcggacgcatcttcccattctttttcggaatgtaagttctctttgcaggattgggactataagtctcatcctttatactctctatgagtttgtttatcctatcaatgctcatttcatcctcagttttgccatctgtgccgggtgtcatgttgcccggctttgcatacatacgttggtaggcgacaaagaacatctgttcattgaatagaatacggtaaagcctttcgtatttatactcgggctcattgctgtgtccagctaaaatgtttaatacttgctctggatttctcatacgtctctcacgttttccgttgtttgtattaaagttacagactacttcccttcgccatgtacaaggctttcccttgctcagactactacggaagttccgttaccatatcggatattcaaaagctttctttatagctgtttgttccagcgttccgacttaggtaatccccagttagttctcttaataactattagcacgacatactgtcggatgtgactttcgttcttgtccgcttattgcggctgtgtcatagtcggttctttatgctctgcactaacgcacaaaataggcagagtactatgaaacaacgtatgtataatagtcttccgttgttgcaagatttggtaccactgaactatcattcaaccaatcaaggcttcatccttatgtatgtcttttcgtcttgcccctcagtcgccacctgactattagtggacttggagctttaatcagtatgctacactctccatcgggtttcccttttggataaactgattgacgataggactatatcgaacccaatcctaacttcttgctaaagaagtatttattaagcgaccattctgggcgcacgggcatatatctgggtggttttcaaatccgtatgccccaaaagacggcttacggtctcgatgggcacaccgtgcgagagcagcacggtggtggcgttcgtatgccgggcaacatgataggtcagccttatcttgaaaccgcactgcctgccaagttccttcaatatggtgttgcatctgccgttgctcggtaccggaaatacatgatcgtccttggacagccccttgtacttctctatgatgcgcttgggaacgtccagcaggcggatgttggactcggtgtttgtcttgcgccggcgggtgatgatccagaggttgccgtcgaagaaggtctggagccggtcggtcgtcagcgccttcacgtccgcgtatgccagtccggtgaacacagagaagatgaagaggtcgcgtaccagttcgcaggtcccgcttttcaccggggcctccatcagcgtctgtatctcacgctctgttaggtagccccggtcaacgctttcgggggagttgatgtacccggcgaaggggttgaagggaagcgcaccgctgttgcgggcgatggagatgacgtgcttgagcccgatcatgtaaccccatacggtattggtgcggcatttcttctccgtacgcaggaaatactcgaagttgttgatgaacgtcaggttgagttccttcaggggaatgtcgtcacggcggtacactttcgggacgaactcgcaaaggtgcctgtatatggtacggtagcggttgtatgttccctgcacgcggctgtgtcccactttcttgatgaactcctcgttgtgctgctcgaagagtttcaacagcgtctcgcgtttcacgcccagcccgaggcaggcgtccctcagcctggcggcggtgacatagccgtcggactgcatcagttcctggtaacggcggttcacgtccacgcgtatccggtcaacctccgcattgattttctgcgcctcggcgctcttgcccgtggcacgtgccgttttcacgtcccaaagtttcggaggtacgtccagtttacaactgaactgcttgatttcaccgtccaccgtaagacggcacattagggggagatagccgttggctctctcgctgcccttcttcacgtagaagaggattttgaaagtcgatctgctcatactcgttttcatacttttttgatcgttacaaagttaatatcaagcgagttgtcctcaggtatgaaaaactgtgcaaattactgaaatagaacccgttgtgccgtttcttattcccgttatatcagtaacgatatgggaactgaagtctttcgctgtttttagcggatctcctttttcagcttatgcagtattatgagttaaacacctaactgcttaatagactgcattcttgctgtattatcatcaaccttgctttttcttgctgcgtttactttaaattgatagaaacgtaacagccagtcggcttgatacaaacggttctcacgtaccaatggcggctgtttcagtgccggaagccgtttgtcgtatgtatttacggatatatatccagagtagtagacgcgcctcatggtggggtgttggtagagtgaagaagaaagataaaggatgtctttgtctgattcggttgtggcaccgacaatcatctgcgtactttgtccggcaggaacgaagcgtggaacatggcggaatttttttcggtcttctttgttggtaagtattccctgctggatatagcgcatgggctggtatacacttttgtgatctttttcgggagccagtaatttcagattctcttctttgggaatttctatgtttacactgagacggtcggcgtagagtccggcttcattgactagttcgcgactggctccggggatacttttcaggtgaatatatccgttgaatttgtgtactaaccgcaggtctttggcaacacgtaccaacctttccatggtgtaatcaggattgcgtacaacgccggaactgaggaaaagcccttctatatagttgcgtcggtagaattcgatggtgaggtctaccagttcgcttaccgaaagcgtggcgcggggaatgtcattgcttcttctattgatacaataggcacagtcatagatacaataattggtcagcattattttcagcaaggatatgcaacgaccgtcctcggcgaagctatggcatatcccccagccgcctacggtgtttcccaatgcgccggattggttacggcgcacggtcccactactagagcaggaaacatcatatttagcagattctgcgagtattttcaatttggcaaggacattctcattcatttgatcagaatatttctgccaaaaatacagatagtgtttggaatgggcaaacggtttggcattctctctgttcatttttaacttctttgttacattatgttattctttagtcttattatctgtgtcttgcaatagaagaaaaatgtgtttattacccagctaaatgcatttgtttcgcctatgaatcaagataaccggtcctatagtcaaaaagaaccggacgtttttaaaaaaggtctagttcttttaaaaaaagaactagatgtttaatagaaaagaactagatcttttttgaaaacttcaagttcttttttttgaaatgtttgaagaaacactgaagctgccaatcagtattgtttcgttatcaataataaaaagagggcggatgttttgttccgtcctcttctttatctattgtttaacgaaattaatgacaatgtccgcatccgcatccaccttcatcaccgcatccttctccgcagtcaccacaaccacagccgcatccttctccactcatcatttttaccatttcctgaatttcttcattagtggctgtgcgggattctactacttcaccttcaaaagtgagatctttacctgcatgaggatggttcaaatctacagttacagtgtcattggttacttcgcttacggtagcgtagaagtgatgtccctcattgtcctgtaagggaatgacagctcccgggaagatgcgttcttcatcaaaaacaccatcaatggtgaacatatctttagatacagtgcgcacaccttcgggcatatattctccgtaggcttctgcggtaggaatgacaaatttaaatttgtcacccttctttaaggctgttatttctgtttcaaagcgttccagtgtggttcctaatccggatatgaattggaaaggatgttctacagttgcttcttctaccaatgttttctggccgtcctgcattacataaagtttgtatgctacggtgatgtacttattttccatgttttcttattataataatgtaatataaactatttacgtaagttttttgttggcaaagatacgaattaattccccttaatcctttgttattacgtttatattacataaatttgttattatgatactataaatgcgcttttgattgcgtttgatccttgatataaatcaattaaccgctcgccttgatagatttttgctttaattaacggatatatgacaacatgtcgtaaagcatgttgttatatttgcagtgtaaagagaaagagataacgagattgtttttaaaaggcctgaattcaaacagacaatgcaacagtgtcgaattcattgttagttaataatttatatttttcctttggggtcatgtaacccaatctttttctcggtcttgagtttaagatgttttgaacgcgcattacctgttcattggttatgtccctaaagtccgtacccttcgggaagtattgcctaatcaaaccattgctgttttcattggctcctctttcccacgagtggtatggttttgcaaagtaaacaaaaatatttagtttacgtgcaatttcttcgtgaaaactaaattcttttccattatctgccgttattgtatgtatttggtctctaaaaggttccaaggcatcgatggcagctttagttagcgggctggcatctttcccgctaagtagtcttatccatactagtccagttaccctgtcgtttatagttaatagtgctcctttgtgattcattccaatgactgtgtcaatttccaaatcaccaaaacgtactttcttgtctactatcgtaggacgcttgtctatgtccacgcggtttttgataaaaccacgtccattagtcaatgcacctctcttcttatgacttcttccccgtcttcttaaatgcttgtataacaacttatctccatgctttttatcttcccaaatatactggtagattgtctcatgagaaactgtttccaagccctttgttcgcataaacccagtcacttgttctggactgaaatctttctttatgagtatatctacttgaattttcaagtcgtccgtaaacttcacgaagtgctttcgtgaacgcattctggacatatacttagcctgagcgagatccggtttgtaaatgccattacgtttatcactattacgacgtaattcacgacttatagtgctacgatgaactcctacaagattggcaatctcggttcttgactttccgctttgcagataagcggaaatgttatacctttgttcttcggttagctgtttcatattgcaactgaatgttggggaactggaagatgcaaagaaacaacttttccacaggggaacaaaagggaaagaaatcttctttctctgttcctctgaaaaattattcttttcgtatcttctcattgtcatcattctcactcctgttgcattatccgcttgaacttaggaggtattatttagttcttaggtactaaataaattgtttttaggtttaacaaattaaaattttaggtattatgaaacgtttagtattgttggttgtagtggcattaggaatgtcagctacaagttttgcaggagaaaaagtagaaggtaaagattggaaggtagatgttaacgtcgcaaagttgagcaaatatttgaatttggatgcacgtcagatggaggaagttgctaatatttctgattattttgctgacaaagtacaaagcgcaagctacgcaaaagaagctaaacaaggtaaaaaattgcgtgaagccgtatatggaaacttcaaactgatgaaacgtacattgacaaatgagcagtacaagaagtatgtacagttgttgaatgttacattgaaaaacaaggggttggattcctatatggaagatgtggcgaataagtaaatttataaaatgaaataaatgaactgaaaagagaatgcaaaccaatgcattctcttttttatttatccgttggaagatacagtgtatatttgtgataaaatgattgtttaaagctcgatttagttacgaataataatttataagaaaaaaaatcttcattttatttgtttgttacgaaaaacgccttacctttgcagtcgttaaagaaacaaagaaaacagatatatgaatattactactctaaataacctagcagtcctgcatattattcgcgtcgtggtggtcacactaggagcgtgagaaaggttgtgtatgtgtagttgtacatataaagaaataattggaagcctttctcacatggtgaggaaggctttttcaataagtataggacgttatagatttagaataagatgaagaatcagttacgcagttcgtttagcacacagggtcgccgtatggcaggagcgagagctttatgggtggctaacggcatgaaaaaagaaatgatgggcaagcccattatagccatagtaaattcgtttacacagtttgttccgggacatacccatctgcatgaaataggtcagcaggtgaaagttgagattgaaaaactgggatgttttgcagcagaattcaatacgattgccattgatgacggaatagctatgggacacgatggtatgctgtattcactgcccagtcgtgatatcattgccgacagcgtggaatatatggtgaatgctcacaaggcggatgcaatggtgtgtatcagtaattgtgacaaaatcactccaggtatgctgatggctgccatgcgactgaacataccggctgtttttgtatcgggtggtcctatggaagcgggagaatggaataaccagcatcttgatttgatagacgccatgattaaatctgctgatgcatcggtcagcgatgaggatgtggctcaaattgaaaataatgcgtgtcctggctgtggttgctgttcgggtatgtttacggctaattccatgaattgcctcaatgaggctattggtctggggcttccggggaatggcactattttggcgactcatgccaaccgtactcagttgtttaaagatgcggctgctctgatagtgaagaatgcttataaatattatgaggagggagatgacagcgtgttaccacgcaacattgctactcgtgacgcttttctgaatgccatgacattggatattgcaatgggtggttctaccaatactgtgctccatcttttagctatcgcccacgaggcggaagtagatttcaagatggatgatattgatatgctttcacgccatgtgccttgtttgtgtaaagtagctccgaatacacagaaatatcatattcaggatgtgaaccgtgccggtggtatccttaatatattgggagaattatccaagggtggtttgctgaaaactgatgtgaaacgagtggacggcctgacattggcggaagctgtcgaaaaatataatatatgtaagaaagaagtggatactgaagcaaaacgtatttattcaagtgctccgggaaacaaattcaatataaagttaggttctcagaatgctgtttataaagaactggatacagatcgtgccaatggttgtatccgcgatttgcaacatgcctatagtaaagatgggggtttggccgttttgaaagggaacattgcacaggatggttgcgtagtgaaaacggccggagtggatgaaagtatttggaaattctcggggcctgccaaggtgtttgattcgcaggatgctgcttgtgaaggtattttaggaggaaaagtagtcagcggagatgttgttgttatcactcatgaaggtccgaaaggtggtcccggtatgcaggaaatgctttatcctacttcttatatcaaatccaagcatttaggaaaagaatgtgctttgattaccgacggacgttttagtggaggaacttcgggattaagcatcgggcatatttctcccgaagctgcagcgggtggtaatatcggaaaaatagtggatggtgatataattgaaatcgatattccgaatcgcagtatcaatgtgaaactgagtgacgaagaattggccgcccgaccgatgacaccggtgacccgtgaccgtaaagttcctaaaagcttgaaggcatacgctagtatggtaagttctgcagataaaggaggagtgagaatcattgactaaattagaaattaaaaattgagaataaaaaaaatagatttgttgtcattggtcgattgtacggcatcgtatttttttgattttcaattctcaactaaacaattatggcaaaagaaaagataacaggagcagaggcgatgatgcgttctttggagtatcaaggagtgaaaactcttttcggatatcccggaggttctatcatgcctacttttgatgctttatatcatcatagaaatacattgaaccatatattggtccgtcatgaacaaggagctgcccatgcagcacagggatttgcccgcgtatccggtgaggttggtgtctgtttggtgactagcgggcccggtgcgacaaataccattactggcattgccgatgctatgattgacagcacgcctatcgtggtgattgccgggcaggtaggagcttcctttttaggtacggatgcttttcaggaagtggatctggtgggcatcactcagcctattaccaaatggagttaccaaattcgtcgtgcggaagatgtagcttgggctgtagcccgtgctttctatatagctaaaagcggacgtcccggtcctgtcgttttggactttgccaagaatgcacaagtggagatggtggattatgaaccgatgaagcttgattttatccgtagttatgatccagaacctaatcctgataaggaatctcttcaggaggctgccgaattgataaacaatgctcaaaggccattagtgttggtaggacagggggtagagttaggtaatgcgcaagatgagttacgtgcatttatagaaaaagccgatatgccttgtggctgtactttgctgggactttcggctataccaacttcgcatcctttaaacaaaggaatgttaggtatgcatggaaatctggggcccaatgtcaaaactaatgaatgtgatgtgttgattgctgtaggtatgcgctttgacgatcgtgtaactggaaaattagatacatatgctaaacaggcaaaggtgattcatttggatattgaccattctgaaatagataagaatgtaaaagtggatgtacccgtattaggtaattgtaaatatacgctagctatgctgacgcaacttatccggaagaatgaacattccgaatggattgatagctttactgaatatgaaaagacggaatatgaacatgttatcagtaaagaaattcatcctgttgacggggcgttgaatatgggtgaagtggtgcgtgcggtaagtgaggcttcgaacaacgaggctgtattggtgacagatgtaggacagaaccaaatgatggctgctcgttattttaaatacagtaagaaccgtagcattgtaacttcgggtggattgggaacgatgggattcggtcttcccgctgctataggcgctactttcggtcgcccggatcgtactgtatgcgtatttatgggggatggcggtttgcagatgaatattcaagaattgggaactatcatggagcaaaaagcaccggtaaagattattttattgaacaataactatttgggtaatgttcgtcaatggcaagctatgttttttggtcatcgttattcatttactccgatgttgaatccggattatatgaagattgccgaggcatatgagattcctgcccgccgtgttatgaagcgtgaggaattgcaggctgctatccatgaaatgttgactactgacgggccattcctgctggaagcttgtgtgatagaagagggaaatgtgttgccgatgacacctccgggaggctcggtgaatcagatgttactggaatgctaatttaataattatggacaagacattatatacattaatcgttcattcagaaaatatcgccggtttgctgaaccagattacggcagtgtttactcgccgccaaattaatatcgaaagccttaatgtttctgcatcttccatcaagggggtgcataaatatactattactgcttggaccacccaggatgtgatagaaaaagtggtgaagcagattgaaaagaaaatagatgttttgcaggcacattattttactgatagtgagatttatcagcatgagattgctttgtacaaggtttctactcctgaatttcaggagaatcctatggcatctaaagttatccgccgttatagtgcccgcattgtagaagtgaatccggttttctctattgttgaaaagaatgggatgagtgaggaaattactgctctttatgaggagttgcgcggattgggatgtgtgttgcagtttgtccgttcgggacgtgtggccattactaccagctgtttcgagcgtgtgaacgaatatctgacccaacgcgaggaaaagtatcgccagcaaaaaacagaataatgatgagtgagaataaagtaggaacatacagatttgtggcagaaccctttcactgtgatttcagtggaaagttgaccatgagtgtgttgggtaatcatttactgaattgtgccggctttcatgctgccgaccggggtttcggaattgctacgctcaatgagaatcattatacatgggtactttcccgtttagctgtagagttagagaatatgccctgtcaatatgagggtttcagtattcagacatgggtagagaatgtttatcgtctttttacagaccgtaattttgcaattttggacaaggaaggaaagactgtcggatacgcccgttctgtatgggcgatgatcagtatggaaactcgcaaacctgctgacctgcttacgcttcacggaggtagtatcattgattatgtatgcgataagaaatgtcctataagcaagcccggtcgtattaaggtgacagagaaagctccggtttctgaataccagaccagatatagcgatattgatattaatggtcatgtgaacagtattaagtatatagaacatattctcgatttgtttcctatagagttttttaaagagaaacggattaaacgttttgagatggcttatgtagctgagagttattatggtgatatattgagtttctaccgcgaggaagtggaggagaaagaatatgatatagaggtgaagaagaatggcacagatgttgtcgttcgtagtaaggtgatatttatttagaatctaatttttaatttttaatttataatttaaaatggcacaattgaattttggcggcgttacagaaactgtagttatccgcgatgaatttcctttggaaaaagcacgtgaagtattgaaagatgaaacaatcgctgtgatcgggtatggtgtacagggaccgggacagtctttgaatcttcgggacaatggtttcaatgtaattgttggtcagcgtccgggaaaaacatatgaaaaagcagttgctgacggatgggttccgggtgaaactctgtttggtattgaagaggcttgtcagaaagcgactatcgtaatgtgtctgttatctgatgcagctgttatgtctgtatggccgactatcaaaccttacttgacccaaggcaaggcactttatttctctcatggctttgccattacttggagtgaccgtacaggggtagttcctcctactgatattgatgtgatcatggtagctcctaaaggttcgggtacttcactgcgtaccatgttcttggaaggtcgtggcttgaactcttcatacgctatctatcaggatgtaaccggtaaggcttatgaacgtactattgcattgggtattggtatcggttcaggctatttattcgaaacgactttccagcgtgaagcaacttctgacctgacaggtgaacgcggttctttaatgggggctatccaaggattgttgttggctcagtatgaagtattgcgtgaaaacggacatagtccttctgaagcatttaatgaaactgtagaagaattaacccagtcattgatgcctttgtttgctaagaatggtatggactggatgtatgctaactgctctaccactgctcagcgcggtgcattggattggatgaccccatttcacgatgctatcaaacccgtagttgaaaagttatatcacagtgtgaagactggcaacgaggctcagatttctatcgattctaactctaaacccgattatcgtgaaaaattggaagaagaattgaaggcattgcgtgaaagcgaaatgtggcagactgctgtaaccgtacgtaaacttcgtcctgaaaataattaatagttagtatttaatgtagaaagcggggatgcgatgaggtatctccgctttcttttatatatattaatgttagtggtgttgtttatatcatgtgtagtcgctaattttgtgaaaacttgacttaggcatgaataatagattatcacttttattaatagggtgcatatttccctttctatctttttatgcacaaaagaacatgaatctcccgccatattatcctacagtaaaaggtattacggattatgctatgtggcagctcgtatatccggattctttattaagggccaatattgcaggtgaagctgtgtgtacgctccgcattgatagtttggggactgtccgttgtaaatatattgaagccactcaccccttgtttgctaaggcggccgaagatgtgattgagggtatgcgtgaatggcagcctgcaaagaaagcgggtagagatatagatactactatcgtctttcatattccttttaatcctgatgtttacagtgaccgcatttggcggcagcagcaagttctggaatcttgcagaggacaacttgtcgattccatgcctgtctttcctgatgatattcgtagtcttgttatgggaaatatgagttggcctgacgataaagtggataaagccgtcgctatttgccgttttacggtaaatgaaaaaggagaaattgtggatatccgtgtgataaaaggtactcatccggcttttgataaagagtccatacgtattctttctaattttccccggttgattcctgctatgaaaaacagaaaatctgtgccatatgattattttttaactatgcgtttttggaaagaggatctggagcattatttattatatagggaatgcgcacaggaagatttggaaaagatcacttgggagccttatagatactcttcttatcccggtggtactgttgctttgacgcaatttattaattctcatctgaaaattactcccgaaatgaaggctacgggaaagcagggacgggtgatttatagtttcaatgtggatatagatggttcaatgaaagattttcagttggtgagaggacttgatccattaatggatgccgaagcattgcgggtacttcaattagtgaatgaaagatggagtacggggtattatttcaattcaaagaaatggtatcgggagttttatgtgaatcaattcaccattccaattatttttagttggtagtggtggcagagggcagatacgcggactgccctctgcgaaaatgatagcattattaaaagtggatgaaatttattaggtaggattcatgctgtttcataatagcgggatgattgtgatataaatacctgtaataattgctgaagtaataactcccgatatattggctcctagtgcatctcctaggataaatgaatcaggattgtctttactgacaatcttttgtgccactttggcagtagttggtacgcagcttacagcagcaatgccaatgactggattataatttcctttcttgatatagtacatgatatatccgcctaaaatacctccgatacctgatagtaacaatgccaacatacctagtatcagcaattttaagattttaggatctagtagcagatgagcgtcgcaaagcactcctaataataatcccagcataaaagtagaaccgtaaagcaatggaccgctgacaaaatcataaatatgtttcatccctgattcacgtacagccactcctagaaatagagagaaaaacaggggagaggccactggaaaaaggaagcagagtacagcgcagagtaccgctgcgaaagcaagctttaccttggcatcgtaattcttcggcgctttctttacggtcattttgatggaacgtaaacgtttgggaatcagtaatttaaccaaatagggataaccgccgtaagtcaatcctaaatagagataagctaccacggtaatcggtacaaacaaatgcttggctaatgccaatgaagtgaacagtaccatcggaccatctgcacctcctaccatggctacagaagcactctcttgtgccgataagccaagtgcattggcaattggcaatgtgagaaaggttcctagttctccgcaaagtgccagaaacaaactagcaaaaggtttttgtagcaggaaacctacatctagcaaggttccgattcccatgaagacgaaacaagcgatgagtccattactgaatgtgagggtgtaaaccggttgcagaaaatctatttgcatggtattcatcaattcgtctgtatccgagagcatgggatcaagaaaaagattgcctagatttccatccggcatgattaatgttccacaattgatggctatcataccgagtcccattggaatcatgaccatgggttccaatattcctttccaacctagataaatgagtagaaatcccaaaagaattaaaaaaacgcgcgcacaggcaaggaaccaaccgctttctatcattgtaccaatgccttggaaaagtattccaaaatctatattttccatatctaattgttgattttcaggttatttattcattgaaagattctttttcacatgagtgcttttttgttgctgattatgcatttcctcccgtttcttaaggtagatcatctttgtgtccggatagtaataatctatcagatttaattgggatgctccatgactgacaccatggtagtaaccaccttcctgttttcctctcagatcgctgttcattcctcggttccagttttcacggctgtctcctagagcttccatctcttctggagaattattccatactaattggataaaacgggcacgtgcttttttgatttttcttaaacgttgaagttccaataggtgggagctatagaaatccatagaatctgctgccagcgctattcctttaataatagcagcgacaaaaaaaccgatgaggaaagtaagccccatcatggccaatgtggataaaaataagtgtagcattataatataaatgtgatttagtaggtaaaatagtattaaattccgagttatagtgatattcacatcgtagtgtcacacatatatgtatacacgccgatagaataatttcaatccggaatgataatgatcaagaataagtaagaggaaatagctgctaaatcaaaatatgtcctaatgtgtaaatgaagtatttacacgaggattttacataattaatgctaggatataggctattaaatttttgttcaggtagaagaatacggtaatggcaaagtactttgattgtagataagggttttgatgttttggtaaacatcggagtacgtaaagtgaaacataaaagatttacttcggatagtttcacattaggagcgtcatatcgtttttctgtagataattggcgataggaattcgtatcatccgaaagcatggatatagaagatatgacttctggcgggcattcgcggataattcctcctttatttgtactattaaagctacataacaaaaggatacacgtacatatagcaataaaatacttcataattactgttgcaaacataatgataaaaatgggaatacggaacgtaaacgaatagattttataaattatttcatctttaatttttgcgaaaataggaataagacaaaacaggctgtatcgacgaattttcgatacagcctgttttgtcttattgataactttctgatattagaaatataagtaacggtcgtcttttacatcagctttcttatacaggtcattgatgaaactgctagcataacgccctgccatattggacaagttgttttcttcattcttggcatcaaattcttctgcactcttttctttgttgtaaacctgaatcatgtaaacacctgcattacctttgataggaccagttaacttatttatttcagctttacttgcataagcacctaaagctggttcgctagcgcgagttactgaaacatatgccggagcagaaaaagttatatgttttacagaatcgctaactgcatttgccatactttttacttggtcaatgctgcttgcacttttcatttcagctatcagtttttcagcttttttatctttgatgatttctgctttcagcatgtcggcaacaagattaatattacgatatccggcaggattaatcttttcaagagcaactaccatcaagtgatcgttttcaccacattcatacaatggggacacttcaccttccttggctgcaaaaatccatttcaacgcttcacgagttccttttacaccacccacacggtgttctgcgctacggaaatcagcacgttctaacaagcgatatccgctttcttctgcattggcaataattttatccattgtagtgttctgtgctacgaattgactgaaatcattgtatgctttgttgtatgtttctttgctaaattcaaccggacgtttaatcactgcaactttatatttatctttcatagcttttttgtccaatacttgaagaataacgttagcttgtccgatctgaagattggttaattctttgacattagagtttatcaatgtgttaatgtatttagcattgtctgcatctaatgcagcaccttcatagttgcgtgcagtcaaccaagtcgcttcacctgtctgaccatatttttttgcaatatcagtaaagtctgctccacctttcagtgcattaaaaatactatcggctaaagttgcggttttagcagcatcttcggcatatacctgaatttgacgatattggattgagtcgggagctgtctgtttggcaataattttaaaagcattatatgaatcatctgcttggttatagtaaggaccatatacttcgttgatagttacagagtccaaacgagcaactacatcattaggatatacagtcttgttgattgcaatttcagaaaaaggaactacagaaccggtggaacggatgaatgtgttcatgtctgcagcagtacctagctgggtagcgtattcggttacttcgtttaatacctctttgcgatcttcgtcagatggagtaaccaatacatcaatatatttgatgttacgagtttcaacaggctgttcaaaagaaccttttttcttgttatacagatctttgatttcactatttgaaactgtaatagttgaatcgctgatagaagaatagggaattgcagctaataaaacgtctgattgttcagtacgtgatataaaagcatcttcagctgcaaccggatttgaaatcaatgattttgcaatcaggttctgatatttttcagctaaagtggattgtatcaaagtcttttcaataaaattccaaaaagctcccatcttttgatagtattctacatattgtgcaggcattttgcttgcgtccagatgagcgtaatccactaggaattttttcagcatatctttgtcgaaagcaccggtttgcggattgcggaacggggtttgcatcaacaatgggttagtaccttcctcgatgattgcttgaacttcagctttgctgacggtcaaccccaattttgcagcttccgctgcgattaattggttatttacgtaagattgccatacttggtctttcacttgagtcagttggtcgtcatttaatgcagaaacaccttgtgtcaattttatgacttctgtgtattcatctaccattttttgatactcttgtgctgtaagtgtttttccatttacttcacctacgtcttgtttaccctgatgtggttggagaaccttccatgcgtctccggcaatgaatgcgaagagggcaagtccgattacaacgaccaacagagggcctttacttctgattgtttgtaatgttgccatttaattttactatttttgtttattgtttttttatacttcatagatttagcgcacgaagatacaaaaaatgcagcttacaagctattttattgtgaaaaaaatctgttattcgattactttcaactttactaattcaattcttgttgctgttactttaattattttgaaatggaatttatcgaaaatgatctcttcatgtattttggggaaactttggtattggtgcaggatgagtccaccgatagtttggtaatcatcattttccggtaggtcaagtgagaacaattcattggctttttctatttccagacgtccggaaaggatgtattcattgtcaccgacggatttggcaatgtaagaagttgtatcatgctcatcttctatttcgccgaaaatttcctccactaaatcttctagcgccacgatgccggatgtacctccgaattcatcgactactacagctaaggatttcttttgttgcataaataatttcatcagcttatgcgctcccatcgtttcaggagcaataggcaattggcggacactcttagtccagtctgtctgttcacgaaacatttcagaggaatgtatataacctataatattgtcaatgttttctttatagacaataattttacttattccgctttcaatgaagcgggcttttaattcttctatgggagttccatattcgatagcaacaatttcggttctaggtaccatacaatccttaattctaatattcgaaaaatctagtgcattttggaatatcttgacttcggtgtctatgtcttgttcattttgagcatcttgtatactactttgaataaagtaatctaggtcgactttagtaaaagctttttcattagcttctttatttgttttaatgcctacaatgtaaagtaatatattggatattcccgaagcaaacttgctgatgggatagagtaagacatagcaaatgtaagtgggaactgcaaaaatattcagagtgaaattggggttaatcttaaataaggttttaggtaggaattctcctgtgaccaaaatgattaatgtggaaataattgtttggattagtactaataaaaagtggttgtctatcaatcctgacaacaagttttgttcaatgacttgtgccatcaatataccgtaaataactaaagcgatgttgtttcctaccaacatggtagagataaaattgttcggattatgaaagaagatggaaagtatacgtgaatttatgctttggttgttacgatccatttcaaaacgtaatttattggatgaaacaaaggctatttccattccggaaaaaaaagcggaaaaagccattgtaataagaatctgtataataatacccataatagtgagtgaattagcgtatcgaatcagttctagtgctatttgcaacagcttttgtactgtctgctggtgctgtatcttctacagtgaaaatacctgtgttattataaatttgatattctgtcatttgctggttagattcaaatccataaccggtaatgattttatcttcttgttcaatgcggataaatttgtcagaatagaccctttcctgcttttcatcccaaaagagcagatctgtgtcaaatttgtcgcctctttggctgcggatatgcacattgcttctcaattcccaaagtttctttttctcgtagtaataagctgtatcggcttttatgctggcatcaatatggaatagggaatcaaatttttccaaataaactcctttttcaaatgcccaataaggaggattctttttatcataaatttcccattcttctgtgataattttgtagcgggtgataccggaatcggatataagggtagtaactcccaatgttttcatgctgggcaacgaatctctttctgtaatagcttctgccagattcttttcgcctcttgagcatgctggaaataaaacaaacataacagttgtccaaacggcaactgttatgtttaagaatataaagtgtgatttttgttctttttcagacgacataattatctgatagttgttgtttcaccaatccatccgccgattgtaacagagtcacctttctttaaactgaggaagaacaaatcagcatctttgggggtatgggctgcataagtactaattagtttgtttgcttcttcagcaacactaggatctacgctttttgctttttgcaatttgtcgataactgcaaaataagtgcatttgttcaatgctgcttcatcactccaattaggacttgatgcatacatgttagcaatcaaaatgtaaggtttaccgttgttgccatctaacgagatcgctttcagtgcatattgttttgctttgctcaactgtttcttactaaataaaatggcagcggttttatatgcataatcagctttctttaattggtcttgttctaaattgatagcttgatcaaaatagtcgatacatttgtccatatcgcctttcttataatacatgtatccgcaacctacagccgtttctgctgtcggttcgatggcatgtgcagcttcagatgcagcaaagtaagcttcttgttctgtacagtttaacatctgcattacagagataacctgtttcagataatccaaattagtcttgttttgctcaactttcggagcataaattgcttgtaaattatcacaagttgccacaccactattaatgaagaatgcgtcaatattgtcttttgccactttcaataattttttgtcattttcctttgtagcggctttcaaagctccatcagcaactcctgatgcaaataaataatcttgaatgaattgttctttgtatgattcatcacttttcattttacgggcagctgcatccatgaactcttgtaatacaaagtagtcagagttttctttttcaagttcaatggcttctttgaacatgttatatgcttcattcatgtcttggccacccattgtgaagtagtcatgggccttcataccgatgattgagccttttgtagcatctcttttaaccaacttgttcaaatcgtccagatattggatgcgttggtcgtgaactttcatcagttcgttaaagtattgtttttgtttagctgcatctttttcaccggctattaaggcacgaagaatttttgcaccattagtataagtgcttacttgagctttgggggcttctgtaaatacactcatccaaggagtgtaagcatccttgaaattgttagtcttaacatactcagtgtaaatactgatatttttcaagcatcggatactgtcttcaccatgtccgaatcttgatccgtctgacgctccggtctgagcgaaagaagctgtcgtacctaaggaaagaacgaacagcgctgttaccatcttcattttcatcgtatataaatttagttgttgttatttatttgcttctctccattttattaatcaactttccacttcatgaaccaacgttcattgaaagtaagtccaatattgattctcaaataattttcttccattaatcctttaaatttaggactgactttaatgtattgcccggaaatgttcagcatagatttactttggaacatgggaagtccaaacccaatactgacaccatattcgcgtgcaccgtcttggaaactggttgttcctgtgtccggactagtatagctgaccttattataaggacttgaacaataggcccccatacggtaacgaatacgtttcagatagttgtggctgatataacttggtacgaattccgcaccaaaagctatttttgtacggctattcatttccacactttctttattgaacttactccaagctagatcggctgtattccacttttgtaaagtatagtcaacccctatagttaagcggttatcatatacatatgtaagccctataccaaatgtatgtggcattttaaacggattcggaatagtatcgccagtttgtgactgtacatagatagaaccattactttccgcacctgtttgatgatacttatatgcatctccgtgcaaggtacgtcccaaggtataaacagcacctatattaatagtgttttttttatttaacttataagtatactgtaaaccaaaatctaatttataatcactgatagaaaatttgtctaatttaatactacgtgtatctgtcgctccaatagttgtcatggattgatgagtaatatctccataaagatacgaaaaatttgcaccaacagacaaattattaaaaactttataacctaatcctatgaaaacttgatgaaaacctccgtcgccatcataagattcgctccacttcccgttattgttaacatcctcaaaatcatgtgttttggagatgctgtaacctactgtggaaaatggaagaaacccaactgtcatccccatttttttccataggcgaaattgcatagccaaataatcaaagcttgaatttttagcattggtttttacattaccatccttgaagttcgcattttgaagggtcattcctgcatcgaacaagaatgtcaatgaatcgatggctgtataagatgccggattagatgcgttgatttggtagccgtttcgcaagccgtatgctattcctcccatcgctttactgttaccaaaattttgatcagctaactgaccaaagccgtagcgtgtatagggagaatttgtgcttgtttgggctacggctagccctgtgactgtgagtaatattgacgcactaatcagtcttttatagtttatcattatagcttaatattctgtttaaacctttcaatactaaaaatctatctgcaaagatgatactttttaattttgtatcaaaagaaaattcatctccgcccgttaaaaaaaccaaaagtcccggataattcttttgaagatgggtgatatacccgctcatttcaaattccattccgcgaatgacccctgcccggatagctgtttctgtagattgcccatacatcggaacttctcctttggcgcttactttggggagtttgtcggtgaatatgttcaatgctttgaaacgcatacgcattcctggagaaatattgcccccatgataggatccgtcggcatcgataaaatcgtatgtaacacaggtccctgcgtcaataaccagtacatcgtgtccaggcttcagccagtttgctgcaaccacagctgctaaacggtccatacccagtgtttgaggcgttttatataaattagtgataggaacaggggtttcatgacttaattcgatgatattaaaaggcaatcttcccagttggcgccggatagtattgcttagtgttatgacagaagctatgatacctcgtttcaaggggtatcgagaacaaagcatcgggagacaatctaaagaatgattggagccacgaaatacttcaactaactcgcctttgtcaaatatagccaatttagctactgagtttcctatgtcgattattaaattcacaactttgctttttcggctgcaaagtaacgtaaaaaataaataggaatagcaataaaaaatggtatttgtgaggaattaattaatatttaggtgtacttttgcatcggtaaacagaaaatggattttatgaataaattaattatagcattgattttgttattcttttccttgagtcaatcgattagaggtcaggaggataatataaaggtgagtctgatgacttgtgctcccggtacagaaatatatgctttgttcgggcatacggcattgcgctatgaggatacggcacgtggagaggactgggtgtttaattatggtatgttcagctttaatactccccgttttatctatcgttttgtcaaaggagagactgattatgaattgggcgtaacccgttatccttattttgaaggtagttatgctatgcgtggttcctcggtctatcagcagacattgaatttgactatttcggaaaaacagaaactcagaagattgctggaagagaattatctgccgaagaatagggtttatcgttataactttttctatgataattgcactacacgtgcgcgtgatataatagaaaagtgtattgaaggaaaggttgtttattctgaaggaaaagagagactctcttttcgggatattgtccatcaatatactaaagggcacgaatgggatgagctgggcattgatatgtgtttgggcagtgaagctgataagcctattgatacgcgtaagcagatgttcgctcctttttatatgttggaggcagcaaaaaaagcaactatagtagtaggtgacagcgtgcgtcctttgattctgcatgaaaaaaaggtagtggatgtagaaccagaggacgttagggaaggctttccgttgtcacccatggtgtgtgtctttattttaataggagttacttgctttgtagggtggttgcagtttaaaatcaggaaaataatctggatttgggatttgcttcttttcggtgtacaaggattggcgggatgtgtcatcactttcttggtctttttttctactcatcctacggtagggtccaattggcttatccttttattgaatcctatccctttaatttatcttccggttatggtttatcgagctataaaaggtaaaaaagactactatcatacaataaatatagtgtgcttaacatcttttatgatgataatgccgtttatacagcaaaaattcaacgtaacggtattacctttggcactgtgtttgttaatatgttctgcaaaccacgttttattatattacagacaaaacaataaatgaaaggacgcatcttaacttctcttttgactgttatcgcattaacagggttgcaggcacagaacattcctgcggtccctaggttagtggtcggattgactattgaccaattgcggactgattatatagaggctttttcggctttatacggtgaacgtggttttaagcggttgtggaaagaaggacggatttatcggaatgccgaatatgattttattaatgtagataagtcatcagctgtggcggccatttattctggtactacaccttataccaacggaatcgtgggggataactggatggaccgcagtactcttcgagtccttaattgtgtggacgatgctgattttatgggcatttatacttcagagtctacttctccgcagaaaatgaaggtgtcgactttgacagatgagttggtaatagccacacaaggagtagctgaagtttattctatcgctcctacacgtgaaatggcggtgttagctgccggccatgcttcgaaaggtgcattctggttgaatgatgaaacaggaaaatggagtggcagcacatattacggtatatttcctgcatgggtgactacttataatgaccgtgaaggactagatttccgtatcggcaatatgtcgtgggcgccttatttgcctgtgactgtctataaatatttgactagcgagaacaaacaagttacgttcaagcataatttcgatgatgaacggaaaaataaataccgtaaattgaaaacaagtccctatgctaatgatgaggtaaaccgtttggttaatgcttgtttgagtaatacttccattggaaaggatgctgttctggactttttgtcactagcatattatgccgggaattatgatcataaggctcctgcagaactcccgatggaaatgcaggatacatatgtacgcttggataacagtattgctgaattattggaattgatagaccggaaagttggtttgaacaatactttattctttataacctctacaggatatgctgacacagatcctgttgatcctcctcaatataaaataccgggtggagaattccatattgaacgttgttctgctctgttaaacctttatttggctgctatttacggtgaagggcaatgggtggaggcacattttgagcaacaaatatatttgaatcataagctgatagagcagaaacaactgaatatgtccgagatattgaaccgtgcggcagaatttttggtacagttcagtggggtgaaagatgtatattcttcacaacgtttacaattgggggcgtggactcctaccattgataaaataaagaattactataacccgatatgttctggagacttgtggatagaagttttaccaggttggactgtgttccgtgaacattcgcttgatacgcaggtgcaacgctattcgtatgcgtcggctccattgattttcattgggaacggaataaaaccggaaataatccatgcgcctgtaaaaataggtaatatagcacccaccgtagctcattatatgcgtattcgtgctcctaatgcagccgttctggcaccaatgacagacatcagaaaataatattaaggagagaagtgcaaattaatctgcattttattgtaactttgcattttcaaaagtaatcaaattagaaaataataaaaacaaaaaaatacaatgggatttaatgaatttattggcaaattatttggaaataaggccactcgtgacatgaaagaaatcaagccatgggttgataaagtaaaggctgtttatccggaaattgccaaattgagcaatgacgagcttcgtgcaaaaacagtagaattaaagaaatacatttctgattcggctgcagaggaacaaaagaagatagaagaattgaaaggtactatcgaaactacagaactggaagatcgtgagggcatcttcgcgcagatagacaaactggaaaaagaagtgctggaaaaatatgaaaaggcactggatgatgtacttccgcaggcttttgccattgtaaaagacactgcacgccgtttctctgaaaatccggaattgattgtaaccgctaccgattttgaccgtgaattggctgctcaaggaaaagattttgtgcgtattgaggacgataaagctatttggcagaaccattggattgctggtggcaatgacatggtatggagcatggtgcattacgatgtacagttattcggtggcgtagtgttacataaaggcaagattgccgaaatggctactggtgaaggtaagacgttagtggccactttacctgtatttttgaatgcactgaccggtaatggtgtacacgtagttactgttaatgattacttgtcaaaacgtgactcggaatggatggggccattgtatcagttccatggattgagtgtggactgtattgataaacaccagcctaattcagatgcacgccgcagagcttatatggccgatatcactttcggcacgaataatgaattcggtttcgattacttgcgtgacaatatggctgtcagtccaaaagacttggtgcagcgtaaacataattatgctattgtcgatgaggtggactctgtattgattgacgatgctcgtactccgttgattatttccggtcctgttcctaaaggtgaggatcagttgtttgaacaacttcgtcctttagtagagcgtctgtttgaagctcagaaaaagttggctacccaatatttggccgatgccaaacgcttgattgcatcggatgacaagaaagatcaggaagagggatttttggcattgttccgtagtcataaggcactccccaaaaataagccattaatcaagttcctaagtgaacaaggtattaaggcaggtatgctgaagaccgaggaaatttatatggaacagaataacaagcgtatgcctgaagccactgatccattgtatttcgtaattgatgaaaagcaaaacagcgtagatttgaccgataaaggtatcgacctgattacaggaaatgcggcagatcctactttattcgttttgcctgatattacttcccaattgtctgctttggaaaatgagacagatctgacagaagaagaaaagctggccaagaaagatgaactgatgacaaattacgctatcaagtctgaacgcgtacacactatcaaccagttgctgaaggcttatgctatgttcgaaaaggatgacgaatatgttgtaatcgacggacaggttaagattgttgacgaacagacaggacgtattatggaaggccgtcgttattctgacggtttacatcaggctattgaggccaaagaaggcgtgaaggtggaagctgctacccagacttttgctaccatcactttacagaactatttccgtatgtatcataaattgtcgggtatgaccggtacagcggaaacggaagcgggagaactttgggatatttataaattggatgtcgttgttattccgacgaatcgtcctattgcccgtaaagatatgaatgatcgcgtttataagacaaaacgtgagaagtataaagctgttatcgaagagattgaagaaatggtgaaagaaggacgtcctgttctggtaggtaccacttcggtggaaatctctgaaatgttgagcaaaatgcttgctatgcgcaagattgagcataatgtgttgaatgcgaaactgcatcaaagagaggcggatattgtggcacaggcaggtcagaagagtatcgtgactattgctactaacatggcaggtcgtggtaccgacattaagctgagtccggaagtgaaagctgcgggcggtttggctattatcggtacggaacgtcatgaaagtcgccgcgtggaccgtcagttgcgtggtcgtgccggtcgccaaggggacccgggttcatctgtgttctttgtatcattggaagatgatttgatgcgtttgttctcttcagatcgtattgccagtgtaatggataaacttggcttcaaagaaggtgagatgattgaacacaagatgatttcaaattccattgaacgtgcgcagaagaaagtggaagaaaataacttcggtattcgtaaacgcttgctggaatatgatgatgtgatgaacaaacagcgtgtggctgtttataccaaacgtcgtcatgccttgatgggtgagcgtatcggtatggatatcgtgaatatgatttgggatcgttgcgcttatgctgtagaattgggcgactttgataatgtgaagatggaaatattgcagacattggcaatggaagtaccattcacagaagaggagtacaacaagatgagaaaagaagatcttgcagagaaaacctttgaagcggcaatgaacaacttcaagcgcaagacagaccgtatggcccagattgccaatcccgttatcaaacaggtatatgagatgcaaggacatatgtatgaaaacatcatgattcctattactgatggcaagcgcttgtataatatttctgttaacttgaaagcggcttatgaaacagaaggtaaagagattgtgaaatcatttgagaaggcgatactgcttcatactattgatgatgcttggaaagaaaatctgcgtgagctggatgaactgaaacattctgtgcagaatgctagctatgagcagaaagacccgttgctgatctttaagttggaatcggtcaatttgtttgacaacatggtacataagatcaataataataccatctctgtattgatgcgcggacaaatcccggttcaagaaccggaacaagttcgtgaggctgctcccgaaccgcagactcctcgccaacagtatagagaggagaagcaggatttaagtgatcctcaccagcaagctgctgccgaacgtgatactcgtgaggtaaagcgtgagccggttcgtgcagagaagacagtaggtcgtaacgatccttgtccttgcggaagcggtaagaaatacaagaactgtcacgggcaaaatgcgtgataaataacgattattatagaaacgtccggggcgaatttactacccggacgttttttttattccttttaactcacttcttacgtaaataagcgtatttttgttccctaagaaaaaatgataatatgaaaagatccgtttcattaataattctagttgctgggacgcttcttgcttcctgcagcagtttgcagaccatatcttttgatcagttacaggcagccgatgtcagttttccagatgctgtgagaaaagtggctgtgataaacaatatgcctgtactgaaaactaaagataatcatgaaatactgagcagcgaattggaaggcgatggtaaagtggcatccgaagctttggcagagaatattgccaatgtgaattatttcgatcaggtcattatctgtgattctgtattccgggcacaggataaagtgccacgggttaatgtcattctgaccaatgaggaagtacggaaactgagcgaggatttgggggtggatatgatattgtcttttgatcgtattcatattcagactaagcccggcgtactgttctatccggattttcctatgcctatagatgctgtagatggaattatatctccgattgttagagtatacattcccaatcgtgataaacctttgtttgtagttgccaagcaagataccatttcctgggaaatagaaccagctctttctgaccggaagatagtaaaagaagcttcggaatatgccgcttctattccagtagaacatctgttgccacattgggatgaggtggctcgtttttattacgatggcgggaatattgaaatgcgtgatgccggtgtatatcttcgtgagaacaattgggatgaagcgtatagtcagtggaagatagcctatgagaagagaaaaggccagcaaaagatgaaagcggcttttaatattgcactatattatgaaataaaggataatgtagaacaggccaaggaatggttgggtaaagcgaagaaattggtgaaatcaggcagcagggatgaacaattgatagccttttattcattggagttagagaaaagagagagtaagctatcccaattaagaatacaaatgaaacgttttgatgataatttttagagaataagtgttgagagaaagattttttttgtacttttggatataaataatatataaaattgattttggtatgaaattcagtgcacagtcacatgcttctattgcgtcttcgctccgggaagcggttgataaatatatagcggatggagagagaacagtagtcaccgatatccatttgcaacctaagcaggacagtggtgaattagttatttttaatgatgatgacgaagaattgtcacgtaccataattgaagagtgggtggattatagtgaagatgatttttatacaatagtagagcgtatacttcgtggggagatcaacgcattgaaagatacgggagttttggataagttagctataatgaagccttattcttttgttttagttgatgaggatagggaaactgtaaccgaacttttattgatagatgaggaagacactttattactgaatgatgaacttttaaagggtttggatgaagaattggatgcatttttaaaagacttgcttgaaaaatagataaaataatagaagtatcgggatagtaaagttcccgatgcttttttatatcataggagaggaaaatgatttttcaagaatggtgtttaaaatattgttttctcatccatcggtcaaaaataatgaataagggtatagttatgatgaatagcagataaatgagaggtatttgtatttttaaaacatgactaaatgcatgatacatagttgctttaagatgctttccaaaataaatatacagaccgatgctgctgcttattattaagaatagagaagcagcaatagtagctagtaacatctttctctcctgtttcttttcacgtaagagtatagcttcctctactttctgcatggtgcggaaagtaaaattggaggtcagccggaattggggctgttcttttacagccttcattaatcctttatctttttgtttctcgttcattctgcttctgttatgagtatatataatttttttcttattcgatgcaattttactttttcattgctttccgtcagtcccaggataagggcgatttcaccgatagttttctcttcattataaaatagggaaatcaaggcgcgttcttctgcatccagtttcttgatggccttattgagttttcctacccgttccccgctttcatcattcagggcatcgtctatttgctggtcagatatattcattaacatggcactgtccataacaattaactcttgttttttttttctggttgccgatatggcggtgttatatgcaatgcggtatatccatgtagagaaactactctctgctttaaacgacgaaagatgttcaaaggctttcaagaacgtatcctgggtcaactcttccgcatcctcctgattctccacgatgcgtataatcaggataaatacttgctgactgtatttatccaagaagtattcgtagagagaagtttctccttttaatatcctatgaataatatgtgtttcgtcgttttccattttgtctattagacgcagggctgggagagaggttacataaaaagagaaaatatttttttctttctcaaaagtgtaacctctttggctacgcagcgtctaatggatacaaaggaacaaaattaataacttaaatacgaataaattatgggttacattaccggttggattgttgtaggtatcattacattaggaatctacaaattatttgaactttttgttggtaagaaagagcgtcttactatgatagaaaaattgggagacaagttagatccttccatgttggggaacaggcttagcctgcctcttcctgtaggaactcctttcatgtcatcttctccgatttctttctcggccttgaaatttggctgtttgttgctgggtatgggactagggttgttgactggttatattatttgtgcaaccacggttcccgattatttcacagagcgtaattggcgcatgagcgagttaacttcattgatttttttctgcaaagttactacaaaaaagtgaaatgcggaaagatatagtgatagaattgagttacaagggttttagttgaagtggcgaaaattcgtgaagccattacaatccctgccaaagccaaatcctgacgccgcaacgttacttgttcgtaaccatgcccgaaaatgcgacaaacgggtacggatgacgaaacaagacgctaaggaatagtgagttaccgacaactcacgcgaaaaatttgcttacggaaaaagattgcgccgttcctccccgttttgcgtaccgacaccggactcttcaccaactaattttgaaaccaaaaaaattaaggacgatgaagagtacattttcagtaatctactatctcaagcgtcaggtagtgaaaaaagacgggacagttcccgtcatgggacgcatcacggtggacggcagccagacgcagttcagctgcaagctgactgtcgatccgaaactgtgggacaccaaagggggacgtgtcacgggcagaagcacggcggcactcgaagcgaaccgtatgcttgacaaaatgcgggtacgcatcaacagacactatcaggaaatcatggagcgtgacaacttcgtcacggcggaaaaggtgaaaaacgcctttctcggactggaacaccgctatcacacgctgatgcaggtgttccgccagcacaacgaggactatgagaaacaggtggaggcaggcatgaaagccaaaggcacactggaaaagtaccgtatcgtttacaagcacctgcaagagttcctcgacatccgctaccatgtgaaggacatcgccctgaaagagcttaccccggctttcatctccgacttcgagatgttcctgcgcacggacaagcactgttgcaccaataccgtctggttgtacgtctgcccgctacggacgatggtattcatcgccatcaacaacgagtggctgacgcgcgacccgttccgcgagtatgaaatcaagaaggaggaaacgacacgcagtttccttaccaaagaggaaatccgcctgctgatggagggcaaactgaaaaacgccaaacaggaactgtaccgtgacctctacctgttctgcgctttcaccggattgtcattctcggatatgcgcaacctcacggaagagaatatccgcacctatttcgatgaacacgagtggataaacatcaaccgccagaaaacgggcgtggtgtccaacatccgcctgcttgacatcgccaaccgcataatcggcaaataccgtggactgtgcgagaacggcaggatatttcccgtcccgcattacaacacgtgccttgccggtatccgtgccgtcgccaagcgttgcggcatcaccaagcatatcacgtggcatcagagccgccacacggcggccacaacggtatttctctccaacggcgtacccatcgaaacggtcagttctatgctcggacacaagagcataaagacaacgcagatttacgcgaagataaccaaagaaaaactcaatcaagacatggagatccttgcggcaaggttgaacggcattgaggaatttgcaggttgtaccatctaaaaaagagaagccatgaagcgtgacataatcatcatagaggacaaggcggtcagcgtaaccggtaacgaagtgtggatgaccgccaccgaaatcgccggactgttccatacgaccgtcccggcagtgaacgctgccatcaaagcagtccgcaagtcggacgtgcttaacgactacgagttgtgtcgctacatgcagcttgaaaacgggctgtacgcggacgtgtacgcgcttgaaatcatcatcccggtcgctttccggctgaacacctacaacacccacctgttccgcacatggctggtgggaaaggcactctcaaaagataaccggcaggcatacgtgatgttcattcagaacggaaaggtcgggtactgttaaaaacagattccccataagacaagtaaacgggcagcaccacaaaaggtgtcgcccgtttactttttcatgcaaccgcctcactccagcggcttgcggtagttcgcttccagcacctcgcgcagccccgtttccgggtaaagcaccttccctcccaaaaggataaaaggcaacacgcggttgttgcggtattcctgcaaggtgcgtcggctcacacggagcagttccgccacctcgccgtccgtcaggtaacgctccccgtccagcggaggacggtaactttccagaaatgcggacagccatttagagcctttgcgcatatcctgcatcacagaggctatcggctcgtcttccatcgtaaaaacatcgttggtctcgttcatcataacttcggattcagtgggtgaataaatcaaatcatctgccatgcggatagagcgtgccgacaagcggtatcagccgcttcacctcctccggcttgtaatagaacctgcggtttatctgcgagtagccgataagccgcctgtcgcgcagcgtctgcaacgtgcgcgggcttattctcaactgcccgcagacctcctcgcccgtgagccatctttccatgcgccccgtgtcgcttttgcgcctcagggcggcgaccttctccgagagtgcgccgaatgccgccaccatcatctcgaaagtctttttctcgatagatactatttccatattcatgcaattaccggtttgcccgcaaaggtaacgatgcagcccttaacacgtaccgttttccgctgaaaggctgcctgttgcgccgtttgaccgggttatggagccatcttccgtaaaaatcttacgtgagtcacgtagtgagttgttaaagccccttttgtttattgccgaattttgccgcagaaacaaaaagaaaggactgaatatgaaagtgataacgatggaaagttccgtcttccggtcattgacggaacagatagcggagattgcggcacacgtccgtgccgcctccggcgacaagaaagcggcatcgtccgacaggttgctcaccacacgcgaggcggcgcagctgcttaacgtgagtacccgcaccctccagcgtatgcgcagcgagcaacgcatcgtctatgtcgtgcttcgcggtaaatgccgctaccggcagtctgaaatcgaccgcctgcttgatgagtgtaccgtcaacgaggacgccgcgacaccgcaggagctgaaacgcaaccacacgctacgaacgggaggcacacccaaaggaaggaggacatagctatggaactgctcacacgaaacatcttcgagggctggatgcagaagctgatggaacggctcgaccgtcaggacgaactgctgctggcaataaagacggaggaacgacagcccgccctcacggaaagcatccaccttttcgacaatcaggacctgtgcatgctgctccagataagcaagcgcacactgcaacgctaccgcagcgtcggtgcattgccctacaagacactgggcaagaaaacctattacagcgaggaggatgtgctgacattcctttccaaccatatcaaggacttcaaaaaagaagatatagccttctacaaggctcgtatccataatttctttcataaataacccattaaaacatttttagatggcaaagaaaaaagacgaaaaggacgtgctggtagtccgtgacgagaagacgggcgagattagcgtggtagccgggctgaacgcagacggtacacctaaacgcacccccgcgaaagcggagaacgcgcagagtttcctgcaattcgaccgacatggcgacgtgctggacaacttcttcaagaacttcttccggcagtgcaaggaacccagccgcttcggtttctaccgcatcgcggcggaccaagtggattccatgctgggcgtgatgaaagacctgctccagcatccgtaccagaacaaacaaatcctcgcaccgcacaaaatcgacaccttcccctatcaacagcaggtgatggaagagcaagctgcgcaacagacagagaaacaagaacctcaaaaacaggagaacatggaacaacagaaagaacagcaacaggacaattccgaacagacgcagggcaaacggggctaccggcccatcgacgagagtaaaatcaactggcaggaactggaggacagatggggcgtgaagcgtgacgaccttgaaaagtccggtgaccttacgaagatgctccactacggcaagtccgacttggtgaaggtcaaaccgaccttcggcggcgaatcgttcgagctggacgcccgcctctccttcaagaaggacggcgaggggaatgtcagcctcgtgccgcacttcatccgcaaggagcagaagttagatgagtacaaggaacacaaattctccgacaatgaccggaagaacctccgcgaaacgggcaacctcggcagggtcgtggacattgtggacagggaaacgggcgaaatcatcccctcctacatcagcatcgaccgcaagacgaatgaaatcacggacattccggcgagcaaggtgcgcatcccggagcgcatcggcaagacggaaatcaccgcgcaggaacgggacatgctccgcgccggactgcccgtgcgcgacaagctcatcgagcgcaacgatggcaggaagttcgtcaccaccctgcaagtgaacgtggagcagcgcggcgtggagttcgtgccgggaaccggcaagtcaccccgtaccgcacagacgcaggaaaccaaaggcgacacctcgaaaaatcaggcgcaaggcggggaaaatgccgaccagaccaagaaggagcaacgccgcaacacgtggacgaacgaggacggcagcatccgccccatcagcaaatggagcggcgtgaacttcaccgaacagcagaaagccgactatgtggcgggcaaggccgtgaagctggagaacgtgaccgacaagcagggcttccatgccacgatgtatatcaagttcaacccggagaagggacgcccataccgctacgacacgaaccccgatgtcgggcagcaggtcgccccgtccaacgagagccgcacgcaggtggcggtgaacaacgagggcaagaccaacgaggcgacaaagaacctgaaagagcctttgcagaaaggtcagacagccccgaagaccgcccgccagcaacagcagcaggacaaaccgaagaaaacgggcaagggcatgaaaatgtaatcccgtgtccgccactgaatccaaaataaaatccaaagtatcaacaacaaaagcaagaaaacatgaagacaatcattgcagaaaagccctccgtggcacgtgaaatcgcccgcatcgtgggcgcgacaaaaagagaggaaggatatttcgaaggaggcggctatgccgtgacatgggcattcggacacctcgtccagcttgccatgcctgacggctacggcgtgcgcggattcgtccgtgacaacctcccgattatccccgacaccttcacgctcgtcccccgtcaggtcaggacagagaagggctacaagcccgacagcggcgtggtgtcgcagataaaagtcatcaaaagactgttcgatgcaagcgaacaaatcatcgtggcgaccgatgccggacgcgagggtgaacttatcttccgctacctctaccactacacgggcagtaccactcctttcgtgcgcctgtggataagctcgctcaccgacaaggctatccgcgagggattgcgcaacctcgaagacggcggcaagtatgacaacctatacctcgccgccaaagcgcgaagcgaatccgactggctcgtgggcatcaacggcacgcaggcactctccatcgccgccggacacggcacgtattccgtcggacgggtgcagacacccacgctggcgatggtgtgtgaacgctactgggagaaccgccgtttcacgcccgaagccttctggcagctccatatcgcaacggacggttgcgacggcaaggtcgtgaaattctcatcctctgaaaaatggaagtcgaaagaaccggcaacggagctatataataaggtaaaggcgacaggcttcgcaacggtaacgaaagccgagcgcaaggagaaaacggaggataccccgttgctgtacgacctgaccacgctccagaaagaagccaacgccaagcacggcttcacggcggaacagacgcttgaaatcgcgcagaagctctacgagaagaagttgataacctatccgagaacgggaagccgctacatccccgaagacgtgttcgctgaaatccccaagctgctcgcctttatcggcacgcagcccgaatggaaagacaaggtgcgggcaaaagccatcccgacacgccgcagcgtggatgacggcaaggtaacagaccaccatgccctgctcgtcacgggagagaaaccgctcttcctctccaaagaggacagcaccatttatcagatgattgccggacgcatgatagaggcattctccgaaaaatgcgtcaaggacgtgactgctgtcatggcggaatgtgccggagtggagtttaccgtgaaaggcagcgtcatcaggcaagccggatggcgtgccgtctatggcgaggaaaacaaggatgaaaccactatccccggctggcaggaaggcgacacgctgacactgaaagcctcttccatcacagaagggaagaccaagcccaagccgctacataccgaagccaccctgctgtccgcaatggaaacggcgggcaaggaaatcgaggatgacgcactgcggcaggcgatgaaggactgcggcatcggtactcccgccacacgcgcctccatcatcgaaacgctcttcaagcgcggttacatggaacgctgcaagaaatcgcttgtccccactgaaaaggggcttgcactcaattccgtggtgaagacgatgcgcatcgccgatgtcgccatgacaggcgaatgggagaaggaacttgcacgcatcgagcgtggggagctgtccgccgataccttccgcaaaaagatagaggcgtacacgcgggagattacctccgaactgctctcatgcgacaaactcttcggcagccgcgattccggttgcgcgtgtcccaagtgcggcacgggcaggatgcggttctacggcaaggtggtacgctgcgacaacacggagtgcgggcttctcgtgttccggctgaaagcgggacgcaccctgtccgacgatgaaataaaagacctgctcactgacgggcacaccaagctgctcaaaggcttcaagagcaagcagggcaagaacttcgatgccatagtcgcctttgacggggattataacacgacgttcgtgttcccggaaaagaaatgcaagtcttcctatccgaaaaaaaggaaataatcactaacttttgataagttaggctgcatctcaacaatagaaacaaacaagtttttttcgtattgtcttcgatttgcactaactttgccacttgttcagagtaatgaattgttcttcaataccggattacactcatactttggatttagtggtggcactcggagggataccgagtgcctttttcttccttttttcaaccgattatcccgttaaatatcaatccactaaactccaaagtaatgaacaacaagaagaaaaacgagggtcaggccgacttttcctattacggtctgtacctgctggactatctccgcacgaacaagtttgaacaggctgatgacactgctttcatacgggaacgcgccgaccgtgccgccgaaacgtatgaaaaggctcggctcgaaggctatcccgccgacggtgcgcaggaactggctatggacacgctgctgcgcgggctgcgttattcccgttacgacatcctccgcgaagtcgtggagaacgagttttccgatgaagtgccggaagagaagcgtgaagcctttatccataaactcctgccgcttgtcggcaacgtgttctccgtctatgacctctcggacgacaacttcgccctgtcttccgattacgacctgctctacacggagctgacgggggcaaccgtcctttacttagacgaatatggcgtttaaccgcaaacagaaactgcgggacaacatcgaggcgatacggacggcattcatccttgacagggaacagagaacggcgacaaccgaagagcgtgccatactccaaaggtactgcggtttcggcggtctgaaatgtatcctcaaccctgcgaaggaactgacggatgccgtccggtgggcgaaatccgacctcgaactgttcgccccgacggtggagctgcacaggcttatccgtgagaacagcaatgacgaaacggagtacaagcggtttgtggattcgctgaaagcgtccgtgctgaccgctttctacacccccaaagagataaccgacacccttgcggacgtgctggcggattacagcgtccgtcccacccgtatgctcgaaccgtcggcaggtgtcggcgtgttcgtggattccgtgctacggcacagccccggtgcggacgtgatggctttcgagaaggatctgctcacgggtacaatcctgcggcatctctatcccgacaagaaaacgcgcacctgcggttttgagaaaatcgaaagaccgttcaacaattatttcgacttggcgatgtccaacattccgttcggtgacattgccgtgttcgacgcggaatttgaaaagagtgggtccttcggcagacgatcggcacagaaagccatccacaactatttctttctcaaaggactggatgccgtgcgtaacggcggtatcgtggcgttcatcacctcgcaaggggtattgaacagcagcaagacctccgtgcgtaacgagctgttcagtcaggctaatctggtatctgcgatacgcctgcccaacaacctgttcacggacaacgcggggacagaagtgggcagtgacctgattgtcctgcaaaagaacctcagcaagaaggaaatgtcgcaggacgagcggctgatgaccgtgatacagacggacacgaaaaccgacctgaccgacaacgcctatttcatccaccacccggaacgcatcgtgcatacgacggcgaaacttgacacagacccctacgggaaacccgctatggtctatctgcacgagggcaagaccgcaggcatagccggggacttgcgccgtatgcttgacgaggatttccattacaggctcgccatgcgcctgtattcgggaacaatccggcaggcgggaacggaagagagggttgccgtacaaaaggaaatggagcgtcctgccataaaattggaaacggtacctccggcacaagcggtggaaactccgacggagaaaccgcaatccgcagaggaaaagccggagatagaacctcgtccgaaatattccgccggagtgcagctcacgttgctcgacctctggggcatgacggaagaggtcagccagcctaaaaccgccaaaaagaaaaaaacggcgaaaaaggaaagcccggcaaggcgcgttacgcccaagtcgcaggtgcagaccacacagaatgttacggctgtgccgacggcttccacccctaagaatgttacggaaaacaaagaggcgaaagcggacagtgccgccaagcctgccgacccggacgacatctatgcaaagctggactgggaaaccaatcctcccatcaacggcttctacgagatgatgatgggactcacgccggagcgcaggaaggaacttcgggagctggcaaggcagcataatgagaaacaggaaaacagaacggttgcgacggtcacgccggaagtaccacgtgaacacccccggcaggagaaaacacagccggaggttgccgccacacctgccgctaccgctgctccaccggaagcggtggcgacttccctttttcccgacatcgaaccggaaaagccgaaggaggaagtcgtggaccttacgccgcgtgcctaccaccgcacgccggagatgcacctgcgcgaagggtcgttagtgacagattggggacgtcataacatcggctatctgaaggacatcacaccatacggggctacattccagccgctcgacctgaaaggctaccagaaggagaaggcgttacagtatgttttactccgtgacgcctacgagcggctgtaccgctatgaatcgaacctgcacgaagcaaatgtccagtggcgtgagcatctgaacacctgttacgatgagttcgtcatgcgttacggcaacctcaacgccaagcagaacgtgaagctggtgatgatggacgcgggcgggcgtgacatcctttcgctggaacgggtgaagaacggaaagtttgtcaaggcggacatcttcgagcgtcccgtttccttcgcggtggagagccatgccaacgtaggctctcctgaagaagcactgtccgcgtcgctcaacaagttcggcacggtcgatctcgactatatgcgggagataaccgacagcacggcggaggagttgctcacagccctgcaaggacgtatctattacaatccgctcgtgaccggttacgagatcaaagaccgtttcatagccggaaacgtgatagagaaggcggaacgcatagaggcttggattggtgacaatcccgaaaatgagcgtatgcctgaagtgaaacaggcgttggaagccttgaaagacgccgaaccgccgcgcatcgccttcgaagaccttgatttcaacttcggggaacgatggattccgacgggtgtctatgccgcctacatgagccgtctgttcgacacggaggtgaaaatcgcctactccgcaagcatggacgagttttcggtggcgtgcagccacaagaacttcaagatatgggacgagttctgcgtgaagggctattaccgcagttatgacggtatgcacctcctgaaacatgccctgcacaacacctgccccgacatgatgaagtccatcggcaaggacgagcatggcaacgacatcaaggtgcgcgacagcgagggaatacaactcgccaacgccaagattgacgagatacgaaacggtttctccgaatggctcgaagagcagtcgccgcagttcaaggaacggctgacgacgatgtataaccgcaagttcaactgtttcgtacgcccgaagtatgacggctcgcaccagactttccccgacctcaatctgaaagggctggcaagccggggcatcaggagcgtctatccctcgcagatggattgcgtctggatgctcaagcagaacggcggcggaatttgcgaccacgaggttggaaccggcaagacgctgataatgtgtattgcagcgcatgaaatgaaacgtctgaacctggcgcacaagccgatgattatcgggttgaaagccaatgtcgcggagattgctgccacctatcaggcggcatatcccaatgcgcgtattctgtacgcttcggaaaaggacttttcgaccgccaaccgcgtgcgtttcttcaacaacatcaagaacaacgactacgattgtgtcatcatgtcgcacgaccagttcggcaaaataccgcagtcgccggagttgcagcaacgcatcctgcaagcggaacttgacacggtggaggaaaacctcgaagtgctgcgccagcagggaaagaacgtgtcgcgggcgatgctgaaaggtctggagaagcgcaagcacaaccttgaagcgaagctggagaaggtggaacacgccataaagtcacgcacggacgacgtggtggatttcaaacagatgggcatcgaccacatcttcattgatgaatcgcaccagttcaaaaacttgacgttcaacacgcgccatgaccgtgtggcggggctgggaaacagcgagggaagccagaaggcacttaacatgctctttgccatacgcaccatacaggagcgcacaggaaaagacttgggtgcgaccttcctctccggcacgactatcagcaactcactgactgaattgtacctgctgttcaagtacctgcgcccgaaggagctggaacggcaggacataaggtgttttgacgcttgggcggcgatatttgccaagaagacgacggattttgaatttaacgtgacgaacaatgtggtccagaaggagcgtttccgctacttcatcaaagtgccggagcttgccgccttctataatgaaatcacggactaccgcacggcggaggatgtgggcgttgaccgccctgccaagaacgagatactgcaccacataccgccaacgccggaacaggaggacttcatacagaaactgatgcagttcgcaaagactggcgatgccaccctgttgggcagactgccgctttcggaaacggaggaaaaggcgaagatgcttatcgccacggactatgcccgcaagatggcactcgacatgcgtatgatagacccgaattatgaagaccaccccgacaacaaggcgagtcactgtgccaagatgattgcggagtattaccaaaaatacgacgcgcagaagggaacgcagttcgtattctctgatttggggacataccagccgggagacgggtggaacgtctattcggaaatcaagcgcaagttgacggaggactacggcataccgccaagcgaggtgcgcttcattcaggagtgcaagaccgacaaggctcggaaggcggtgatagacgccatgaatgccggaacggtgcgtgtgctgttcggctccacctccatgctcggaacgggtgtgaacgcacagaaacggtgtgtggctatccatcaccttgatacaccgtgggtgcgacatgaagtcgcatagataattgttggaatgatacttacgggtatcagctttaacccgctgttccgtcagcggtagcctaccaccgatgcaccttaatagttgtattaagcggttgggacaaagtacactttcgcaagacaagacagaaccgtgaggggaagtcaagtacggttagtatcataccgtagagtggcgaggcaggatagtatggttagcgcaagcgaactgttagtaaacttcgtaatgtcacgaaagagtgtaagatactggtacactctacccaaaagggaagcggtcggttaatcctttccatggtaggattacacggatataagcaccgccggaggatgagacagaacctaacctatccgttagttatctatgtggaacatggtaagcctgtatatctcctgccatgtaaaaatggcaggtaagctgacagcaatgaaagccgaatggtgtgcaggtataagataacagaaaaagcgaatgccgttctgtaatggaacggatacggattgaaccgacatcacgggctgatgtaggcgacatcatccgacacgaaagtgggcagacttctgtggcgacactcggtaggcaaaacaaaccgaatgttgccaaatggtgattctttacaatagacttttagaacttttttaaagtaggaatgcaaatgaacgataaaatcaaagaaaaactcctcgaccaatcgtgtgcaccgactgataacttgcaaacgaattgggacaggatagactggaccaaagcggagcaggctgttaagaagcttcaagctcgcattgtaaaggctcagaaggaaggcagaacgggcaaggtgaaagccttgcagtggacgctgacccactctttttacgcaaaagccttagccgtaaagagagttacttctaacggaggtggtagcacccccggggtggacatggaaacatgggagaaacccgaagcaaaaacacaagcgataagtgagctcaaacgcagaggctacctgccgaagccattgagaagagtccacatcaaaaagagtaatggcaaactgcgaccgttgggaataccgacaatgaaagacagagccatgcaagcactttacctcatggcattggaaccagtgtcggaaacaacagccgacacacgttcgtacggtttccgcaaggaacgtcgctgtatggatgcggtacagcaatgtcataacattctccggaaaggctattctcccgaatggattttggagggtgacataaaggggtgcttcgaccatatcagccatgaatggttgcttgccaacatccctatggacaaagcaatactccgaaaatggttgaaatgcggctatatcttcaacaaacagatgttcccgacagaggagggaacgccacaaggtggcattatctctcccacgcttgccaatatgacattggacggattgcagaaagtccttgcagagaaatataaacgagttagaataaaaggcaagttatattcgccaatggtgaatcttgtccgctatgctgatgactttataattacctgcgagaaccgtgaaacacttgaaaaagaaatcaagccattggtagccgactttatgtctgaaagaggtttgaccttatccgaagaaaagacggtgataaccaacattcgtgacggtttcgatttcctcggtttcaatattcgcaaatacggcaatgaaatattgacaaagccgaccaagaaagccgaaaaacgctttatggaaaatatccgtaaggttacaaaaggtcataagggttgcaagcaggaatcattaatcagaatgttgaatgctaaaatccgaggatggggagcatattatcagcatggggcgacacgtgattcttttcacagaatcgaccatcagatatttctcgccttgtggcaatgggctaaacgccgccattccaagaaaggaaaacggtggataaaagaccgttattggcacaatatccgagggaacagctggacttttgcggctaagttcaagaaatcaaacggcaaggaagaccaactcactttgctgaaactggcatcttcgtttcctttcctgcaatatacgcagataaaaggggatatgaatccgtttgacgcagactgccgcctgtacttcaataaaagaatgaagtcaaagatgcttgtgacactgaaaggacgtaagtccctgctttacctatgggaaaagcaagggcggaaatgtccgatatgtggtgaaccgattgacacgtataaggcatggaacgtaatgccaaccgtccaagacggacggaaatgcaatctgttggttcatgatgaatgtttcaaattatcccgtaaaaacaatggaaacaagaagtaggatgagccggtctctgcacacgaacagagactttgaaaagcttgagccgtatgaggggaaaccctcacgtacggttctgaggggggaagagggcagtaatgcccttgacctacccgatcgaccgtccgacctgcaacagcgtgacggacgcggagttagagccggaaacgaaattgccaagcatttcgccgggaacaacgtggacgtaataatctacgcggtggagaagtcactggacagctacaagttcaacctcctgcattgcaagcagactttcatcagccagcttaaaagcggtgcgatgggtgcacgtaccatcgacgagggggctatggacgaaaaatcgggcatgaacttctcggagtacatggcgttgctatccggcaacaccgacctgctggacaaggcgaaactggaaaaacgtatcgcctcgctcgaaggggaacgcaagtctttcaacaagggcaggcgtgattcggagttcaagctggagtcaaagacagccgagttgcgtaacaacacggctgtcatagatgccatgacggaggactggaaccgcttcctttcggtggcgcagaccgacagggagggcaaccgccttaatataataaaggtggacggtgtggattccaccgatgagaaggttatcggaaagcgtttgcaggagatagcgaaaaacgccactacgggcgggctttacacacaggtcggagaactttacggttttccgataaaggtggtgagcgagaggatactcaaagagggattggagtttaccgacaaccgcttcgtggtagaggggaactacaagtacacctataacaacggacatctggcaatggctgacccgttggccgccgcccgcaatttcctcaacgctttggagcgcatcccctccatcatcgaccagtacaagactaagaatgaagtgctggaacgtgagataccgcagttgcaggagatagcgggcaaggtgtggaagaaggaggaagaactgaaacaattgaagtctgaacttgccgcacttgaccgaaaaatacaactggaacttgcgccgcccacgcccgaagtcgccgaaaaggagaacgaagggcaacaggtcaagccggaagcggaagatgtgcggaacaggcaggcgcaatattccgaaaatgcaccgccgcagatacgcaatccatcggaaagtattatccccaatcacaccataactgggcatccggggctgtatgccaaggaggaaacccggttcaaaggattgaaaatataaccttaggaattttatctgaagtattaataggggctatcccaaaaggtctaaaagtaaattttatcctctctgcaagtatctgtaggatggtaactgcattttttctttttgggcagcccttattaaaatttattcttattttaggttatatacattcatgtccatttatgtaaaaaattcctgctgaccttgtttatgtcttgtcagtcaccatttgcaaaaccatatttgaccctcaaagaggctgaatttgataagcaacttgctacatactcataaaaggagctaaatagaacacgaatgggaaatactcaaatgccaaactaaagaagatattggccaaaataaacgctataccgagagagaaacttgatttttcaacttcctaaaacggtgttgttcaaacatttctacttatttgtacttaccagttgaacctacgcttccctaataaaatgtctatggtaaaaagttaaaaaatcctcccacttttgttagatatatttttttgtgtaattttgtaatcgttatgcggcagtaataatatacatattaatacgagttagtaatcctgtagttctcacatgctacgaggaggtattaaaaggtgcgtttcgacaacgcatctaatgtagtatattattgcttaatccaaatgaatattataaatttaggaattcttgctcacattgatgcaggaaaaacttccgtaaccgagaatctgctgtttgccagtggagcaacggaaaagtgcggccgtgtggataatggtgacaccataacagactctatggatatagagaaacgtagaggaattactgtccgggcttctacgacatctattatctggaacggggtgaaatgcaatatcattgacactccgggacacatggattttattgcggaagtggagcggacattcaaaatgcttgatggagcagtcctcatcttatccgcaaaggaaggcatacaagcgcagacaaagttgctgttcaatactttacagaagctgcaaatcccgacaattatatttatcaataagattgaccgtgccggtgtgaatttggagcgtttgtatctggatataaaaacaaatctgtcgcaagatgtcctgtgtatgcaaactgttgtcgatggatcggtttatccagtttgctcccaaacatatataaaggaagaatacaaagaatttgtatgcgaccatgacgacaacatattggaacgatatttggcggatagcgaaattccaccgactgattattggaatacgataatcgctcttgtggcaaaagccaaagtctatccggtgctacatggatcagcaatgttcaatatcggcatcaatgagttgatggacgccatcacttcttttatacttcctccggcatcagtctcagacagactttcagcttatctctataagatagagcatgaccccaaaggacataaaagaagttttctaaaaataattgacggaagtctgagacttagagacgttgtaagaatcaacgattcggaaaaatccatcaagattaaaaatctgaaaactatttatcagggcagagagataaatgttgatgaagtgggtgccaatgatatcgcgattgtagaggatatggaagattttcgaatcggagattatttaggtgctgagccttgtttgattcaaggattatctcatcagcatcccgctctcaaatcctccgtccggccagacaagcccgaagagaggagcaaggttatatccgctctgaatacattgtggattgaagacccgtctttgtccttttccataaactcatatagcgatgaattggaaatctcgttatatggtttgacccaaaaggaaatcatacagacattgctggaagaacggttttccgtcaagatccattttgatgagatcaagactatctacaaagaacgacctgtaaaaaaggtcaataagattattcagatcgaagtgccacccaacccttattgggccacaatagggctgactcttgaacccttgccgttagggacagggttgcagatcgaaagtgacatctcctatggttatctgaaccattcttttcaaaatgccgtttttgaaggaatccgtatgtcttgccaatcaggattacatggatgggaagtgacagatctgaaagtgacttttactcaagccgaatattatagcccggtaagtacacctgctgatttcaggcagctgaccccttatgtcttcaggctggctttgcaacagtcaggtgtggacattctcgaaccgatgctatattttgagttgcagataccccaggaggcaagttccaaagctattacagatttgcaaaaaatgatgtctgagattgaagacatcagttgcaataatgagtggtgtcatattaaagggaaagttccattaaatacaagtaaagactatgcctcagaaataagttcatacactaagggcttaggcatttttatggttaagccatgcgggtatcaaataacaaaaggcggttattctgataatatccgcatgaacgaaaacgataaacttttattcatgtttcaaaaaacaatgtcatcaaaataatggagcggtcaggaaatttctataaggcaatacggttgggatatatacttatctccattcttatcggatgtatggcatataatagcctctatgaatggcaggagatagaagcattagaacttggcaataaaaaaatagacgagctccgaaaagaaataaacaatatcaatattcaaatgataaaattttctctattgggtgaaacgatactggaatggaacgataaagatatcgagcattaccatgcacggcgtatggcaatggacagtatgctctgccgtttcaaggtcacctatccagcagagcgcatcgatagtgtgcgcagtcttttagaggataaggaacgacagatgttccagatagtccggttaatggatgaacaacaatctattaacaagaagatagccaatcaaattccggttattgtgcagaaaagtgtgcaggaacagtccaaaaagccaaaacgaaaaggtttcttgagcatcttcggcaaaaaagagggaacgaagccaacgacaacaacgactacgctccgttcatccaatagaaacatggtcaacgaacagaaagcgcagagccgtcgattgtcagaacaagccgatagtcttgctgcccgtaatgcagaacttaacagacaactgcaaggattgatttgccaaatcgaaaagaaggtacaatctgatttacaaaatagagaaagcgagataacagccatgcgtaaaaaatcatttatgcagataggcggcttgatgggatttgttcttttgctgttggtcatttcctatatcatcatacaccgtgatgcaaagaacattaaacgatacaaacgcaagacaacggatttgatcgagcaattggaacagtccatgcaacaaaatgaggtactcataacctcccgaaagaaagcggtacatactattacccatgagttgcgtacaccactgacggcaataaccggctataccgaacttttgcggaaagaatgcaatagcggtaataatgggcaatatatccaaaatatactgcaatcctccgaccgtatgcgggatatgctcaacactttgcttgacttcttccgcctggacaacggcaaggaacagccccgtctgtcaccctgccggatttctgcaatcacgcacacacttgaaacggagttcatgcctgttgccgtgaacaaagggctgtccttgtccgtgaagactggacacgatgccattgtattgaccgacaaagagcgaataatacaaatcgggaataacctgctgtcaaacgctgtcaagttcacagaagaaggcggtgtttctttgattactgaatatgataatggagttctgacactggtcgttgaagatacaggtacaggcatgacagaagaggaacagaaacaagcgttcggtgcgtttgaacgtctatcaaatgccgccgcaaaggagggtttcgggcttgggcttgccataatgcgtaatattgtgtcgatgcttggcggaacaatccgtttggacagcaagaaagggaaaggcagtcgtttcacagttgaaatttctatgcaggaagctgaagaacagcttggatatacaagcgatacacctgtttatcataacaataaattccatgatgttgtcgctattgacaatgatgaggtattacttctgatgctgaaagagatgtattcccaagaaggaatacactgcgacacttgcaccgatgctgcggcactgatggaaatgatacgccagaaagaatacagcctgttgctgacagacttgaatatgcccggtataaacggtttcgaattgctggaactgttgcgttcgtccaacgtgggcaattcaccaacaatcccggtggttgtggcaaccgcttcgggcagttgtaacaaaggggaactattggcaaaaggctttgccggatgcctgttcaagccgttctccatatcggaactgatggaagtttccgacaaatgtgccataaaagcgacaccggacggagaacctgatttttcagccttgctgtcttacggcaatgaagccgtcatgctggataagttgatgacggaaactgaaaaagagatgcaggcggtacaggatgcggcaatagagaaagacctgcaaaagctggattctcttacacaccacctgcgcagctcgtgggaagtactacgtgccgaccaaccgctaagggaactttacggattgcttcatggcgatacactcccggatggtgaagcgttaagccgtgctgtgactgccgtgttggaaaaaggagcggaaataatccggttggcagaaaaggaaaggagaaaatacgaagatggataagacaaaaataattgtggtggaagacaacattgtgtattgcgaatatgtctgcaatatgctgtcacgggagggctaccacactatgaaggcttaccatctctcaaccgcgaagaaacatctgcaacaggcaacggataatgacatcgtggttgccgacctgcgtctgcctgacggtaacggtatagaccttttgcgctggatgcgaaaggagggaaagatgcaacccttcattatcatgaccgactatgccgaagtgcataccgcagtggaaagcatgaagctcggttcgatagactatatccccaaacagcttgtggaggataaactggtccctcttctccgttccatacagaaagaacgacaggcgggacaacgccgtatgcccgtgtttgcccgtgaaggttccgcctttcagaaaatcatgcaccgtataaggctggtagccgctaccgatatgagcgtgatgatattcggagagaacggaacaggtaaagaacatattgcccaccacctgcacgacaaaagtaaacgggcaggcaagccattcgtggcggtggactgcggttcactcactaaagagcttgcaccatcagctttcttcggacacgtcaagggcgcgttcacgggtgcggatagtaccaagaaagggtatttctatgaagcggaaggcggcacgctgtttctggacgaggtgggcaaccttgcgttagaaacccaacagatgttactccgtgccatacaagagaggcggtatcgcccgatcggtgacaaatcggacagaagtttcaatgttcgcatcatcgccgccaccaatgaggatctggaggcggcagtgagtgaaaagcgtttccggcaggatctgttttaccgtctgcatgacttcgggataaccgttccgcccttgcgtgactgtcaggaggacatcttgccgttggcggagttcttccgcgagatagccaacaaggaattggaatgcaatgtgagcggtttcagttccgaagcacgtaaagcgttgctgacacacgcatggccgggcaacgtgcgggaacttcggcaaaagataatgggagctgtattgcaagcgcaggaaggtgtggcgacgaaagaacatctggagcttgccgtaatcaaacctacctcacacgtcagtttcgccctgcgcaatgacgtggaggataaggaacggatattacgggcgttgaaacaggcaaacggcaaccggagtgtcgccgcagaactgctcggaataggcagaacaacactatacagcaaacttgaagagtatggacttaaatataaattcaagcaatcatagcccgtaattcactgaatttggctatctttgcataacatttgagaaaaacggcgattggcaggagctttttgccgccaacatataggataagaccgcaaggcgtttcaagcgaaaatctggtaaattggaactacggagacgattgcgtgatgcttatgctatgcttatgcatagcgtgcattcacgtactctccgtaaaggctttaccagagccatcgcttgaaggtagtgtgaattgcacgctactttttttacccttgcctaacgaaaggaaacgattatgggtaaagttcagattctcgccgtactgacgatggacggatgtctttcttcagagttatatgataaagcacatcaggatttgtgccttgaccgttgcggtcttgatgaaatcagggagaaagccctttaccatgtcacaccggactattccatttcaatgctgcacgaatggcggaaagacggtacaaacattcgttacctcgcggaagccacaccagacacgtcggactatatcaacggactgctgcgtatgcacgctgtggacgaaatcatactatacaccgttcctttcatcgcgggaacaggacggcattttttcaaatcggctctgccggagcaacactggacgctttcctccttgaaaagctattccaacggtgtatgtcgcattatctatatccttgataaaaaagcaagatagccaaaatgtgcggcaagcatacatttctattttcaggaatagaataaatgttctgattacaaacaatttaagtcggagataatttgtccttgtgaaaaaatattgaattttatgcctttgaaatccagcaccttgtaaaattgagtgttggatttaatattttctgccgcgctttttgccaattatatttatgtgcgcacgcagaaaacaaagtgtaattttcaaaattgacagaaccatgaattatttcttgttggcggaaaccgactttttccgcctgataaacgaagccggcgactgcaatatggaaacggcatacacggctttcgccacccaagtgatcgaactgtgcaacggcggcatggacatgaaccttaccgtcatcgcgcttgcctacatcgaaatcgagttgcagcaccatcccgtgcgtaatctgtcagaagaaaaaagagagattgccgcctacgtcagcaaggctctgtctttcgtaagaaagatgcagaaattccttgccacgccccaagtgccaccactaatatccgccaataacgcaacagaaaccaccgccagcctcctgcaatggacgggcaatgccatcgacctcgtggaacttatctacggcatcgacgagatgggctgcatcaacaacggcaacatgccgctcaaacagcttgccccgctcctttacaagatattcggggttgagtcgaaggactgctaccgtttctacaccgacatcaaacgccggaagaacgaaagccgcacctacttccttgacagaatgcaggagaaattgaacgagaggatgctgcgcgatgatgagttggatcgtatgaggagataaaaaacaaattcattagaataaatcacatcaattcaattcattattttgttatattagaaaaagatattaactttgcattgaaattgatatagtcataattcagatgaactcaatacacgatataacagactacattatcttacgagtaaaatcggaagatagatttgcgtctttaataaatttaaagttgcagaagttattgtattatgttcaagcatggtcttatggtatcaataaaaaacctatgtttgacggcgagtttgaagcatggattcatggtccggtaaatcgagaaatctacaatcgatttaattctacaaaatatctctattcagaaatcaatattgatgattgcatgaatcacaatgtgagtttatcatcagaagacgctgaatttattgactttatattggagaattatcttaaatatagcggtgctgaattagaacgattgtcccacaatgagatgccttggattgaaacacgtggagatttaaatgtaaatgagcgttgtgacaaggttattactccagaactaatgattgagtattatgggaaaaaatgggaaactattaaatcttaattcagattctcctaaatacggaaacaaatcattagttaccaaagaacaagaaaatgagttaaagagaaggaagataactttttccttctcttactttaagcagatacctaattttcagattggagagtgttctaagggatggcatattgggcttcttgaacgattaggtgctttgggtactatgacaccgcaagaagtattagaagaaaatagaggtagtattgcattaagatgtcatccaatagattggagtgctaaaaacattcctattcaacgaaaagatttagattggctaccaaaagaaatattggacaatgagacagattttccaataatgcaattttcgataacaaaaagtacggggcgtattgtaggttattttgatcgggattcttctatatttcacatagtattattagatcctgaacataatatacaaccggcaaagaaaactaattatcaaatacaaccaactacaaaagggttatctcaatatgatgatttattaaataagttggaacgaattaaaagtatcgtatcagattgttctgataaaaagtgcaaattgcattcacatattagtgttatagaagaattacatgacaatattgtttatataggacttgataatgacttctatagcacttatcaagaaatcttaaagaaaattccattgcaaaaaattttggaaaacggaatcttagtaagtatggataatgcttaagttctaaaaaaatgaagaaaggtttatggtaagcctttcttcatttttttatttacttctgctgcaacaaatgcttcaggttgtcatcgcctgcgatgcgctccagttcatcctgcacaatctgcttcacctcttccttgatgcgccggtagttcgcctgcaccgtttccttcatgtggtcgttgccgtcctcgtccgtgaaatcggtaatgacaggaattttcttgtaggcactttcctcccgtttgaccttttcggcatccaccacaatctcgcagtggaaaatcttctgctcgatgcgctcgttgaagttgtcggacacagaaccgacaaacataccctgcgtaagaccggaaatcttgctcggcgggatgagcgcgtccatctgcgtgttgatggaggtggacacgtcctgccggttgatggagatggactgccgtttctgcaacaccttaccgaaccgttccgatagtgtctttgccgtttcgcctaccacctgcccggaaaagatattgccgacagtgttcatcaccaccttcgcctccttgtccccgtagtctcgcaccaactggctgaaatcctgaaaacccagacacacggcaaccttgttgcttcgggcggtagctataagattgtccagccctttgaagtatatcgtgggcagctcgtcaatgatgaccgacgacttcagcatccccttcttgttgatgagtttcacgatgcgggagttgtacaatccgagtgccgccccgtagatgttctggcggtcgggattgttgcccacgcataggattttcggctcttcgggattgttgatgtccagcgtaaactcgctgtccgacatcacccaatagagctgcggtgaaatcatccttgaaagcggaattttcgccgacgctatctgccccatgagctgctccgcagcccctccgagccaagcgtccatgaatggtgaaaggtagttctccagctccgggtaagaggtcagtatcggaaatatatcctcgtaacggcggttcagaaactcgatggcatgaggaaaagtgcaatacttcccgttctgatagattttgagataccagataatgctggcaaacagaatgataggagactccacgaagaagtcgccctgcttttgcacatcgggtaagtcaagggcattactgcccccttctcccctaagaaccgtacgtgagagtttcccctcatacggctcaagcaactcaatatttctatttgttgttagaaatcggctcatactttcaacagtttcgtttatttcgcttgtagcagttgttatggacaagttgccgtacaattgaaccaccaacagatatttcattgacgttccatgcttttgtacaatctatctccttgccgcataacggacaagtccgcttctgcttgttccataaatataagagtgacttacgtcctttgagagattccagcatttgttgctcctttcgctgaaagaaataatcatcatattccgggtcgaaagggtttgcctcccccttgacttgcttgtacggagtataatgtatatccgacaaccttttaagggtcaggtagttcactttcttgctttttgtttcatatttccatgcaaacgtccatttacgcccccgaatttcatgccaatacttatctgcaacccaagacttgcgtttctttgggtggcgacgtaaagcccatttctttgtgaggttgtaaatgtgattgtcgcaaccgtgaaaagcattggttgatgcaccatatcggtaatagtttccccaacctgttatcacaggattgagcattcgtatcagcgattcctgcttacacattttatgacctttaacgatgtcactgatttttgccctaaagcgtttctgtgcatctttggacggggatgtgtacagccttttgccgaacttccttacattgaaacctaagaaatcaaatccatcgtatatgttcgtaatggtagttttctcttcggataaggtaagacccctttctttgagaaattctatcaccattggtttgacctcgttttccaataattccttatctcgacctgtgattataaagtcatccgcatatctgataagattcactttgtagtggaatgtcttatagttgatgaaacgtcttttgaatctttcagccaagagtggttgaagtccgtcaagtgccatatttgcaagtgtcggtgatatgatacctccttgtggtgtaccctcttctgtcgggaacagtttaccattgaatacagctccacatttcagccattttctgagtattgttttatccatagggatattttcaataagccagtcgtgactgatgtggtcgaagcaacccttaatatctccctccaaaatccattcgggggaatgctggcgatttagaaccgtatcaatctgacgaattgcgtccattgtcctgcgcttctttcggaagccgtaagaaaaacggtcgcctgtcgtttcggctatcggttccaatgccatgagatataatgcttgcatcgccctgtctttcatggtcggtattcccaacggtcggagtttaccgttctttttcttgatgtgaaccctacggagcggctgtggatggtagccacgacgtctaagttcaccgattgctttgtacttgcgcttgggagagtcccaaagctgtttatctactccagacgtattcttccctttgttggaagtaaccctctttactgccaatgccttggcgtaaaaagagtgagtaagcatccactgcaaggttttcaccttgttatgtctgccttctttctgagcctttacaatacgcgcttgtagctttcggacataggtttcacacttggaccagttcataccgtcccaagtcagattcctgctgtcagcaggcgcacacgatgttttaatctcgttcatttgctttcctccttttgaaagttctaaaagttatcttgtaaagagttaccatatacggaagtctgcccactttcgtgtcggatgatgttaccctcattaactcgtgatgttggttcaatccgtatcctccccattacagggcggcattcgctttctccgttatctcatacctgcaccccattcggcttgccttgcggttcgcttactcgcattattacgagagagatacaggcttgccctgttccacgcaattgacaaacggatagtttaggttctgccaagtccgccggcagtgctgtgtccgtgtaaccccaacatgggcgagggttatccgactgcttaccttttggtgagagctaaagtatcttgcgctccttcaaaccttacgacggctaaagtcagttcacttacgttaaccatgctatccagcctcgccactcgacggtatgatactaaccgcccttaacgttccctcacggttcagtcttgtcctttcggaaagtgtactttgtcctataagcttggcacaacccatcactggagatgcaccttatagtaggctaccgctgacggaacagcgggttaaatcttgcaatatacattgctgtttaacaatcaattacgtgacttttcaggtcacacccacgttttattgaggttgagcattatcgtgtaggcactctcgtaagcgtccgtaatatcctccatgaaatccgggtgaatgggattgcaacggtgtgaacggcgcgggtcgtcgaagttgattacatagaatttcggtttcaccttgtagccctccgggtggttcagcaaatggttataggcaatagtggacaagtcgctgaatttgaagtcatatacatacatcgaaaatcccttttcaatctgttgcttgataaaattgtttacaacggcgtatgacttgccgctgcccggcgtacccaacacgatggacgcacggaagggattaaccacattgatccagccgttgttccagcgtttcctgtaatagaaacgtgtcggcagattgaccgaatactcgctttcgataagcctcgtttcctgcatgaaactctcgttctcgttgttgaaaacatcctccatcaaattgtgtttcaacagacggctcatccacagacctcccatcagcaggcagacatagcccgttccaatggtaaggacatatagtcccgtcaccgcttcaagcggcagcggcaggggcagcaaccaccagttcaggaaaaacagcacgaacccgacggcaaatgctgtccagattctcccccaagtgattttctcacccttgacacctttcgtacccagacaggacagggcaagcaaaaggacggaaaacagtttcgtgtacagtatggaatggaacaaccccgccgtgcggtcgaagttcagaaggattttgtccaccacgccgatgttcacgccccacatcctgatggcttcgtagcagaaccagtacacgttcatgaccactaaaatgatactcacggcacgcagaaaatccatgattttcgccaatgccctcaaatcgtcttcttgtgacatacattgattttttaattgttgatactctgattacatacccaagcccttgcgctttttcttctttttgcgcttcattgcccggatgaaagcctcttcctcggcatcggtcgccggaccttcgggagtgagcaagcccataccgcccgacatgtcttcacggtcgtatgcggtctgcccatataccttgtccgcaacatccgccgggatggaaagcggtataggcggttgtccggcgtatggcagtgtgaagtgttcctgcaaggcattcgccgaaagttccttacccatgcgcgaaccgttcagcacgcatcccgtgcggtggtcgatgaaggtagccccatagatgcgcccttcctctgtgtagcgcagcacggtatctatgcccttctctttgagccgggaaataaacctgtccttgtcataagtgccttgcagcacggaaaggacggtgcgtttcgtcatgtctgccagtttcctgtccttgatttccgatttggaacggacaaacttcttctgcacggcttcatagcctgcggacttcccgaagagcgaggacttgaacggattgccaactttgttacccctgtcgtccgtgacggaatagaccagcccgtgatactcccgtccgcgcacgtttcccctcgcttcctccaccgtcatattatataaggaaaggagcgcacggtattcgcccatcgtctggaagcggtactgcccgttcagagccttcacggtgttgcccacctgctttttcacatcgccagccgatgcatccaccttgcgcaacgggttatccaatccctgattttttcgttctgccggatgcaatccatacttctgttccagttccctgcgaatacggtcgctgcggcggtagagaaaatcccggttgagccttttaccgttctcgtccacgttgaccgtcacgatgtgcaggtggtggcggtcgatgtcctcgtgcttgaatacaagataaggctggtttccgaaaccgagtttttccagatactcgcgggcgatattctgcaactcaatatcggtcagcacatcctccgggtgcgggttgagtgagatatgcaccaccggcttctcgaccttcatctgcggtggcaggaaggtgtggaaaccctccatcgccttgcttatgtccaccgttcccgaaccgtcattgtagatgcggttggtggtgagaagccgcccctgcgcctcgttaatcttctccccgttgtaggcaatcgcgccgtacaacgagtttcctacactgatttttgcgaccattttgcttccatttctctcgacaattccacaatctgacggctcagtttcacgagttcgacggtgtgttgctccagcttgtagagcaacgccatcgcctttttctcggaaaaatgcagcctcaattccttcacgacttggttgtaattcgtacccacggcgcggaactgcgcgtgaaaatccgacagcttggtgtagtagtccaccagcgtcttgtccaccttcagcaccttgaacggttgcccgaagaagtgcgctttgaggaaaaccgaccgtgcatagacacccgattttccgaacatggcgaggaaacggttgtgttcctcctcgttgaaacggacggtgtaccggtacaccgccggatcaagtttgggatttctccctgctttgcttttccttttctctttcatatcactttggatttagcggattgacggcataagccgccgcttctgttcacggcaccgcagttctgaaaggctttccgacttcggagggaaagcccgtcccctgcaagggcaagtgcttttccgggatgctcaaatcattttgagcggctgaaaagacatcttgctatgttcaggtgaacataaaaatccgtcaggggacggattgggaaaatacctttcaggactccggcccgcacgccatcggcgaaccctgccgtccgggtgcaaagttacgcccttaaagcggtaatggacagatgcttgacccggtcaatggctgccaaccggcgcaacatgccgccacttgctggagaagtgatacaggttcaaaaatatacttgtttatttgcagcatgattcaagaaacgaacggtttgaagatatgaggaaaggaacattcaaatacccggacaaccgcttcggcggacacttgccgaaacggatacccgaaccgtcggaaacccggttgtccgacaatccgatgacgtatggattcaatgacttcatgacgcaatgtcgtcattcatcacttgtccgccgcaccgcttcaccgcagaaccggatacgtggtgacccgcccgtgtgcctgttcacggaaacggataatgcggtaattcaatccgcatgtaaacagaaaataaaatcatcaacaattaaactgaatagaaccatgagtaaagaaatcttcgttgcattcgcaacacagaaaggtggcattggcaaatccaccgtcacggcactcgccgccagctacctccacaacgtgaagggctacaatgtcgccgtcgttgactgcgatgatccgcagcacagcatccacggtctgcgcgaacatgagacggcactcatcggcgggagcatctacttcaaggctctcgcgtgcgaccatttccgcaagataaagaagaacgcctatccggtcatcaagagcaacgcggtgaacgccctcgacgatgcggaaaggatgatcgccgccgaggtcatgaagcccgacgtggttttcttcgacatgccgggaacactccggagcaacggcgtgataaagacgctatcgcagatggactacatcttcacgccccttagtgccgatcgcttcgtcgtggagagtaccctgaaattcgtcacgatgttccgcgacaggctgatgacgaccgggcaggcgaaaacaaaggggctttatctgttctggacgatggtggacggcagggagaggaacgacctgtacggcatctacgaagaagtgatagccgaaatgggctttccggtgctttccacccgcctgcccgacagcaagaagttccgccgcgacctatcggaagagcgcaggagcgttttccgctccactatcttcccgatggacacggcactgctgaaaggaagcggcatccgtgagttttccgaagagataagcgacatcatcagaccgcagtgagcatgggcagcaggaaagtgaacacggaaggcatcgacgaggaactgctgttggcatccattgggcggcgcactcaggacgggacactgcgtccggcgcaggaagtccccgcaaccgcaccgaccgaagatgacaccgccgtaccggagccgccacccgcgcagcccgtggcacgggagagaacgcagagggaaggcggtcgccggaaaaggcaggacgaggactataacgagctgttcctgcgccgcaacgagataaagacccgccagtgcgtctatatcagccgcgacgtacacggcaaaatcctcagaatagtgaacgatatcgccggaggggaaatctccgtgggcggctatgtggataccgtgctgcgccagcatctggaacagcacaaggagagaatcaacgaactgtacaagaaacaacgtgaagatctgatttgaaaatggaaaaagaaatgacaccgaatgaaaaaagaccgcagcaggactgcggaggcatgcttgcccaagtgaaggcgagcgtggaaatactgtcgctcgtcccggtaagcggcaaatgcagcgagaaggactatgagcgtctgtttatccgcgaccccgaagtaaaggcgcgggagggcaagatggcgtatgtgcgcccggagtaccacgagcgtatcatgcgcatcacccgtgtaatcgggcatgaccggcttacgctgtccgcctacatcgaccatgtgctgacgcaccacttcaaccagtgcgaggacgccataaagagcctttacgcccggaattacaattcagtattctaattaaaaccggaagtatatgaatgaaacaatcagtatgacagacattctgctggcggtatcggtcggctgcaacctatggttcctgttcctgctcctttacgagcgcatcatggaaacgcggcttgtccgcttcttcaagggcatagccggattatggcggtcgttggacaggaatggaccaaagagcgtagcggcacatgaggaagttcccacggcaaagggggacatcatcggcaagagccgtttcaaaatggcatccacccggacaaccgctgccataccggcgcaagaagccgccacttcggaaaaaggcattgagctgtcggaggaagaggctacttttgacgacggaaacacggaaaccgcgtcccgcccggcgcaagtcccggaggaaaagctcgatgagaccttcacgagcataccgccggaggaactgggatacggggaggacgaaccggatgaagacgcttcggacacgccacgggcttcgggcagcagctttgacgagatcgacgacgcctgcaagaccgccaagaacccggatgcaacgcaggcgcaacgtgaaaaggcggccaaggtgttcaccgacatggagggcacggagttgtacgagaaaatgatggaaggctcttcggagataggcatccgcatcaaggggcttatcgagattcggctgaagaaatctgaaaaggagttcgtcgtgccggacaacatcgaggagttcgacattcgcaactatgtatgacaacaataaaagaaatgaacatgaaagaatgacatcaacccacgcggcgaggaaacgcaaggcgcatccccatccgcaacggacacgcccacgtccgtggaaacaaacgggcatccactaaaaccaaagtaaagaaacaaagtatcaaccgcccgacaaaggaccatccacccttttgacggcaaaaaacaagaacagtttatgaacaagaacatcttgaaaaacagaaaagcaatcctctccgcggcacttgtcatcgccgcaaccgcctctgctttcgcacagggaaacggcatcgcgggcatcaacgaagccacctctatggtgagttcttatttcgaccccggaactaaactgatatacgccatcggtgcggtcgtcgggcttatcgggggcgtaaaagtgtacggcaagttttcatcgggcgaccccgacaccagcaagacagccgcctcgtggttcggcgcgtgcatcttcctgattgttgccgccaccatcctgcgctcattcttcctttaataaataatgtatggctgaatacccaatcaacaagggtatcggccgtccggtagagttcaagggcttgaaggcacagtacctcttcatcttctgcggaggtctgctggctctcttcgtcctgttcgtcatcctctacatggtcggcatcgaccagtgggtatgtatcggctttggcgcggcatcgtcctccctccttgtatggcagaccttcgcgctgaacgcccggtacggcgaacacgggctgatgaaactgggagcggcacggagccatccccgatacctgatcaaccggcggcggataacccgtctgttcaaacgacaacgaaaggaagaaacgacatgaggaatacatcaaaaatgacaacactggaaaacaagttcccgcttcttgcggtggagcatggctgcatcatctcaaaggacgccgacatcacggtggctttcgaggtggagctgccggagctttacaccgtgacgggcgcggagtacgaggcgatacacggctgctggtgcaaggcgatcaaggtgctgccggactactccgtcgtccacaaacaggactggttcatcaaggaacgctacaagccggagcttcagaaggacgacatgagcttcctctcacgaagcttcgagcgtcacttcaacgagcgtccgtacctgaaacacacctgttatctttacctgaccaagacgacaaaggagcgtaaccggatgcagagcaacttcagcacgctgtgccggggacatatcatcccgaaggagctggacagggaaaccacgaccaagttcatggaagcctgcgaacagttcgagcgtatcatgaacgacagcgggcttgtcaggttgcgccgcctctccaccgacgagattgtggggacggagggtaaggcggggctggtagaacgctacttctcgctcatgccggaaggtgacatcaccttgcaggacatcgaactttcggcaagggagatgcgcatcggcgacaaccgcctgtgcctgcacaccctctccgatgcggaagacctgccgggcaaggtggcgacagatacccgttacgagaagctctccactgaccggagtgactgccgactgtcattcgcctccccggtggggcttctgctctcctgcaaccatatctacaaccagtatgtgctgatagacaacagcgaggaagccttgcagaagttcgagaagtccgcccgtaatatgcagtcactatctcgctattcaaggagcaacagcatcaaccgcgagtggatagaccagtacctgaacgaagcccattcctacggactgacctcggtacgggcacacttcaacgtcatggcgtggagcgacgatgcggaggaactgaagcatatcaggaacgacgtgggcagccagttggcaagcatggaatgcgtgccgcgccacaacaccatcgactgcccgacactctactgggcggcgatacccggcaatgcggcggacttcccggcggaagagagtttccacactttcatcgaacaggcggtgtgcctgttcacagaggaaaccaactaccgctcttcgctctcgcccttcggcatcaagatggtggacaggctcacggggaaaccgctgcacctcgacatcagcgaccttccgatgaagcggggcatcaccacgaaccgcaacaagttcgtgctgggtccttcgggcagcggcaagtcgttcttcatgaaccacttggtgcggcaatattatgagcaaggcgcgcatgtggtgctggtggacacgggaaactcctatcagggcttgtgcggcatgatccggcgcaagacagacggggcggacggcgtgtatttcacctacacggaagagaagcccatatcgttcaacccgttctacaccgatgactacatcttcgacgtagagaagaaggacagcatcaagaccctgcttcttacgctctggaaatcggaggacgacaaggtgacgaagacggagagcggcgaactgggcagtgccgtgagtgcctatattgagcgtatccaatctgaccgtagcatcgtgccgtcgttcaacaccttctacgagtatatgcgtgacgactaccgcaaggaactggctgagcgtgacatcaaggtggagaagtccgacttcaacatcgacaacatgctcaccaccatgcggcagtattaccggggcggacgctacgacttcctgctcaactccacggagaacatcgacctgctcggcaagcggttcattgtcttcgagatagattcgattaaggaaaaccgcgaactgttccccgtcgtgaccatcatcatcatggaagccttcatcaacaagatgcggcgtctgaaaggggtacggaaacaacttattgtggaagaggcttggaaggctctctcttcagcgaacatggctgaatacctgcgctatatgtacaagaccgtcagaaagtattacggcgaggcaatcgtggtgacgcaggaggtggacgacatcatttcctctcccgtggtcaaggagagcatcatcaacaactcggattgtaaaatcctgcttgaccaaaggaaatatatgaacaagttcgaccaaatacaggcgttgctcggactgacggaaaaggagaagggacagatactctccatcaacatggcgaacaatccttcacggctctacaaggaggtgtggataggcttgggtggcacacaatcggcggtctatgccaccgaggtcagtgcagaagagtatctggtgcgcccgtaaagggaatttgacgaatgtcgctttggcaagcgactgggcaagtgtttaaaatgcccattaacaaccgctaaccggaggggaaaaccccacaagggaacatagcacgttggtaaagccataagtcagccaactgtcaggctgcgaccgaatggcaagttaaaatgatagatatgaggataaagcctgcattggttgaacgatagtccgagcagtcgtatccttgggcaatgacggaagacagttgaataattcttcggaattataccgttatgttgcggtactacactgatgacacgtagcaggagtagcataaacttaccgcaaggcaactaccataagtagtaaaggacgaaagtcgtatccgacaatctatcgagccaaatagtcgtcaaatttctaaacggggattgcctaaaccggaaagccagttgtagggctatggggtctgcccctgaatatccggcatggcaacggagcttccatagtagtctgagcagggtaacgccctgtacatggcgaaggggagcagctaattaagtttaacaatttaaaggaagatgtgagagacatgagaaatccagaaaatgtgttgaacagtctgagtaaacacagcggtaacttgaactataagtttgagcggctgtatagagtgctgtttaacgaggaaatgttttatgtagcctatcagaatatttacagcaagacaggcaacatgacggcaggagccgatggtaaaaccattgacggaatgagcattgaccgagttgaacaactgattggcagtcttaaaaaagagacttatcagcctaatccgtccaaaaggacgtacatacctaagaaaaacgggaaaaaacgtccgcttggcataccctcttttgatgataagctggtacaggaagtagtcagaatgatacttgaagcaatctatgaaggtagtcttgaacatacttcacatgggtttcgtcccaaacgaagttgtcatactgctcttatagatatacaaaagacattcactgccgtgaaatggtttattgaaggcgatattaaaggattcttcgacaatatcaatcatgacgtactgattaatattcttcgggaacgtatcgccgacgagagatttttgcggcttatcagaaaattcctgaatgccggatatgtggaagactgggtatttcatagaacgtacagtggaactccgcaaggcgggattatcagcccaatactggctaacatctaccttgacaagttcgacaagtacatcaaggaatacatcaatcggttcaataaaggggtaacaagaaaaggcgacgctcgatacaagctctacgaacagcgaagataccgactggcaaagaaactaaagaatgagaaagatgtaaaggtaaggaaacagatgaccgccgaaattaagcggctacgagaagaacggaacaactatccggcacgtaatgaaatggacagcagtatcaaacggttaaaatacgtgagatacgcagatgactttctgattggaattaccggtaatcttgaagactgcaaaacagtaaaagaggatattaagaattatttgaatgaagctcttaaactggaactgtcagacgaaaagacactgataaccaatgcgcagaaaccagcgaaatttctcggatatgacgtatttatacgtaggtgtaacgatttacgtaaggataagtacggtaaaacggttcgtgcattcggacacaagcctgtattgtacctgaattttgaaacgatgcggaagaaactctttgattataaagccgcaagaatcgcggtcgtcaatggcaaagaggtttggaaatccattgtcagaacgtacatgctgaacttggatgacttggaaatagtcagtcagttcaatgccgaaatccgagggttctataattactactcaatagccaataacagctatgtcatcaattctttctatcacattatgtcatacagcatgtataaggtatttgcgaacaaatacaaatcatctgtaaagaaaatacttctgaaatataaaaagaacaaggttttccaagtggcatatgaaaatagtaagggtaagacactttaccaatcattttatcatgatggtttcaaacgcaaaaaggttgcagggaatatttactgtgacactattccacggacagtttccataacaggtggacgtaacagccttatggaaaggctgaagctccaagtctgcgaattatgcggtgctaccgataaactcgaaatgcatcacgttcgcaaacttaaagacctgaaaggtaaatccgactgggaaaagaaaatgatagctcgaagacgaaaaactttggctgtctgctcaaagtgtcatgcaaaaatagaccccgaccgaagaatcagactgaattaattagtggagagccggatacagggagacttgtaagtccggttcggaggcgagtactcggaaacctaccatagaaatatgacaaggcgctgggtgcttagcctacgcgtacaccaccgaggaaacggagaaagtggaggtttaccgtctggcggagaagttgggcggcgacatcgaagccgccatccggcaacttgccgagaagcggagaaacaaggaaacaaccaacaattaaaaatgaatttatcaacgaaaaaagaaaaatgcgtatgagtttacagaaagtgaaaatgctgcaagtcagcaagtgtctgatcggattggcggtcatgatgctgcaatcctgcgacgtggccgacaacctccgtgatatgctgtgcgggaactgggagagcgtggaggggaagcccgacgtgcttatctacaaggagggcgaagcctacaaggtgacggtgttccgccggagcggtctgcgccgcaagctgaaaccggaaacctatctcttgcaggaggagaacggcaacctgttcatgaacaccggcttccgcatcgacgtgtcctacaacgaggccacggacgtgctgaccttctcgccgggcggcgactatgtgcgggtgaaaccgcagccgggacacccgacagaagaataacaaccactaaaatccaaagtaacatgagaacaagaataacaatgattatctgcctgtgcctgcttttcgcaggcagggcaagcgcacagtgggtcgtaagcgatccgggcaatctggcgcagggtatcatcaatgcctccaaaaacatcatccatacctccaagaccgccacgaacatggtgagcaactttcaggaaacggtgaaaatctatcagcagggcaaaaagtattacgatgccctcaaatcggtgaacaatctcgtcaaggacgcccgcaaggtgcagcagaccatcctgatggtaggcgacatcaccgacatttatgtaaacagtttccaaaggatgctccgtgatggaaatttcagaccagaagagctgtcggcaatcgctttcggttacacgaaactgctggaagagagcaacgaagtgttgacggaactgaagaatgtggtgaacatcaccacgctctccatgaccgacaaggagcgcatggacgtggtggaacgctgctactccaaaatgaagcgttaccgcaaccttgtgagctattacaccaacaagaacatctccgtgagttatctgcgtgcgaagaaaaagaacgacctcgaccgcatcatggggctgtacgggaacatgaacgaaagatactggtaagcctatggagttcgataaccttcatcagattttacgctcactttatgagcagatgatgccgctatgtggggacatggcgggtgtggcgaaaggcatcgccgggctgggtgcgctgttctacgtcgcctaccgggtatggcagtcgctggcgagagccgaaccgatagacgtattcccgatgctccgcccttttgccatcggtctgtgcatcatgttcttcccgactgtggtgctgggcacgataaacagcatcctctcacccgtcgtacagggcacggcaaagatgctggaggcggaaacgctggacatgaaccgataccgggagcagaaggacaagctggaatacgaggcgatggtacgcaaccccgaaaccgcctacctcgtgtccaacgaggaatttgacaagcaactggaggaactcggctggtcgccctccgacatggtgacgatggcgggaatgtatatcgaccggggaatgtacaacatgaagaagagcatccgcgacttcttccgcgagatactggaactgctgttccaagccgccgccctcgtgatagacaccgtccgcaccttcttcctcgtggtgctggcgatactcggtccgatagccttcgccatatcggtgtgggacggtttccaaagcacgctcacgcagtggatatgccgctacatacaggtatatctgtggctgccggtgtcggacatgttcagcaccatactggcgaagatacaggtgctgatgctgcaaagcgacatcgagcggatgcagacagacccgaacttctcgctggattcgagcgacggggtgtacatcgtgttcctctgcatcggcatcatcggctacttcaccattcccaccgttgccggctggattatccaagccggaggcatgggcggttacggtcgcaacgtgaaccagatggcgggacgtgccggaggaatggcgggcagtgttgccggagctgcgacaggcaatatgatgggacgtgccggcaaattgctgaaataacaatcatgtagaatcattgaaacagaattaagaatggaatttaagtcactcagaaacatcgaatcatcgttcaggcagatacgcctgttcggtatcgtcttcctttcgctgtgcgccgtggtgacggtatggagcgtgtggagttcctaccgtttcgcggagaagcaacgggagaaaatctatgtgctggacaacggcaagagcctgatgctcgccttgtcgcaggacttgtcgcagaaccgcccggcggaggcgcgggagcatgtgcgccgcttccacgagctgttcttcacgctgtcgcccgaaaagagcgcaattgaacacaacgtgaaacgtgccttgctgctggcggacaagagcgtgtaccactattattcggacttcgccgagaaggggtactacaaccgcatcatcgccgggaacatcaaccaagtgctgaaggtggacagcgtggtgtgcgacttcaacgcctatccctaccgtgccgtgacctacgccacgcagaaaatcatccggcagagcaacgtcaccgagcgcagcctcgtgaccacctgccgcctgctgaacgcatcgcggtcggacgacaaccccaatggcttcaccatcgagggcttcaccatcattgagaacaaggatttacagacaatcaaacggtaacggattatgaaacggaaagtaaaaagtatcagaaaaacaatgtggggcgtgtactggaagctccacgacaaacggaaacagctggtggcaaggctcaaagggtatctggacggcttgccgccggaaacacgccgccgcatcgtgctggggatgctcgccgccttcacggtgcttgccctctacaccttcggcagagccatctatgacatcggcagaaacgatggctcacgcatggaaacgggacacgccggacgggtggaactgccgaccccggcggaaacagacaatcacttaacaccttatttatatggaacagacgaagaatgaaccgatgaaagagaacaaaaccgctcccgacacgggaaagccgaaaaaggagcgcgaaccgctgacagaggcgcaacggctgaaacggcagaagatgatcgtgttgcccgctatggtgctggtgttcatcggggcgatgtggctgatattcgccccgtcctccggcaaggagcaacagccgggaacggacggatacaacaccgagatgcccgacgctgacaaggcgaacaagcagattatcggcgacaaactgaaagcctacgagcatggggagatggaggagcgtctggagagccgcaaccgtgccatcgggcagctgggcgacatgttcgaccgcgagatagctggaacggaggacgggacggacttcgacctcgccaatccgggcggcaaggaggaaaaggcacagcctgccacaccgcagactatccaatcctccgctgccgcctaccgtgacctgaacgccaccctcggcaacttctacgaacagccgaagaacgacaatgccgagatggatgagctgttggagcgcatcgcctcgctggaatcggaactggaaagcgaaaaaggcaggacttcatctatggacgaacaggtggcacttatggagaagtcctatgagctggcggcaaagtacatgggcggtcagaacggaggaaagccggaacaggcggcagagccttccaccgtgcagaagggaaagaagaacacggcgacacccgtaaggcaagtgacccgccaaatcgtttcctcccttgcacagcccatgagcaacgcggagtttgtcgccaccttctcgcaggaacgcaaccgggggttcaacacggctgtcggcactacagaggtatcggaccggaacaccataccggcgtgtgtgcatggtgcgcatggtgtgatggacggacagacggtaaggttgcgcctgctggagcctatggcggtggcgggcaggattatcccacgcaatgcagtggtggtcggcacgggcaagatacagggtgagcggctcgacatcgaggtcacctcgctggaatacgatggcacgattatcccggtggagcttgcggtctatgacacggacggacagcccggtatcttcatcccaaactcgatggagatgaacgccgtcagggaggttgccgccaacatgggcggctcattggggagcagcatcaacatctccaccaatgccggggcacagctcgcctccgatttgggcaaggggctgatacaaggcacgagccagtacatcgccaagaagatgcgcaccgtcaaggtgcatctgaaagccgggtacagggtcatgctctatcaggaaaaggactgaaaacaacaatcaataaaaaccatttaccactaaaaaaccaaaagtaatgagaaaagtaatcatcatgtttgccctcgctatgggcatcgcaactgccaacgcgcaggagaatgtaaccgttgaacagaacaacggaagtaatgaacagccgaccttgacgaaggaggtctatccgcagaaggaggcggacggcgacctgtatcacgggctgtcgcgcaagctggccttcgaccgcatgataccgccgcacggtctggaagtgacctacgacaagaccgtccacgtcatttttccggcggaggtgcgctatgtcgatttaggctcgcccgacctgattgccgggaaagccgacggagcggagaacgtcatccgtgtgaaggctacggtacggaatttccccaacgaaacgaatatgtccgtcatcacggaagacggcagtttctacaccttcaacgtgaagtacgccgccgaaccgctgttgctcaacgtggagatgtgcgacttcatccatgacggcagcacggtgaaccgcccgaacaacgcgcaggaaatctatctgaaagagctgggcagcgaaagcccgatgctggtgcgccttatcatgaagtccatccacaagcagaacaagcgcgaggtgaagcatatcggctgcaagcgtttcggcatccaataccagttgaaaggcatctacacgcacaacggcttgctctatttccacacggagataaagaaccagagcaacgtgcctttcgatgtggactacatcacttggaaaatcgtggacaagaagatggcaaagcgtactgccgtgcaggagcagattattctgccgctccgtgcgcagaactacgccacactcgtgccgggcaaaaagagcgagcgcacagtcttcacgatggcgaagttcaccatccccgatgacaagtgcctcgtggtggaattaaacgagaagaacggcggccgtcaccagtccttcgtgattgagaacgaggatttggtacgcgcgggtaccatcaatgaacttcaagtgcgctgaccatgagaaagtacatcgcaataatcatcgcgtcgcttgccctttttacggggcaggcgcacgcccagcggtgtctgccgaagatgcagggcatcgaggtgagggcggacatggcggacggcttcaatcccggcggcaagggtggcgggtacagtttcggggcggcactctccacttacacgaaaaaggggaacaagtgggtgttcggtggcgaatacctcctgaagaacaacctctataaggacaccaagatacccgtggcgcagttcacggcggagggcggctattacttcaagatactgtcggacgcccgaaaaatcgtgttcgtctatgccggggcttcggctctcgccggatatgagtctgtgaattgggggaagaaagtgctgcatgacggctccacgctgcacgaccgggacgcctttatctacggcggtgcgctgacgctcgatgtggagtgctacgtggcagaccgtatcgccctacttgccaatctgcgtgagcgttgcctgtggggtggcgacacacggaagttccacacgcagttcggggtcggcatcaagttcatcatcaactgacacgggcatggaacggacggaaatagatgctgtcagacagatgccgcttgcggacttcctcgcacggttggggtatgagcctgtcagaagtagcggtaacgagctgtggtatatcgccccgtacaggggcgagcgcacaccctctttccgtgtgaacgtggcgaaacagctctggtacgacttcggtttgggcaagggcggcgacatcttcacgcttgccggggagtttctgcaaagcgatgacttcatgaagcaagcgaagttcatagcggaagccgccaatatgacggttgccggatgggaaaagcccgtctatctctcgaagccgaccgaatccgtttttgaggatgtggaggtcgctccgctgctccgctcactgctgacggagtatttagaggaacggggcatcccttacgccatcgcatcccgtcactgctgccgcttgaactacggtgtgcgtgggaaacggtattttgccgttggctttccgaacatggcgggtggctatgaagtcagaagccgatatttcaagggttgcatacctccgaagtctgtatcactggtaaaggcgaatgacatcccggctgacgagtacctcgtgttcgagggcttcatggactttctctccgctgtgacgcttggcgtaaccggtaacgctgactgtcttgtgctgaactctgtcgccaacgtggagaaggcgacggggatgctggagggctacgggcgcatcggctgtttcctcgaccgtgacgaagccggacggcgaacgcttgccgcactcaccaagcgatatggggagcgtgtcaccgaccgttcctccctctatgacggttgcaaggacttgaacgagtacctgcaactgacaacgaaaaaacagaaaaacaaccatctaaaaatcgaagaaaaatgaacatacagaacaacagaaacaagagaaccaacatctttaaggcagtggcgttatgcctgatagtcgctgtgtcattcacccttgtgtcgtgtgacgacgacatggacatccagcagtcctatcccttcacggtggaggtcatgcccgtgccgaataaggtaacaaaggggcagacagtggaaatccgctgtgaactgaaaaaggagggcgacttcgcgggtacgctttataccatccgctatttccagttcgagggggaaggctcgctcaaaatggataacggcatcaccttcctgcccaacgaccgctacctgctggagaacgaaaagttccgcctgtactacacggcggagggtgacgaagcgcataatttcatcgtggtggtggaggacaatttcaaaaattcatacgaattggaatttgacttcaacaaccgcaatatcaaggatgacggtcttaccgccatttccatcggtaacttcagacccttgctgaaatgatgcgtgtattcatgacaatgctctgttcacttctggcggtctgttccgtgtccgcacggatcagccgccaagagggaacggacgggcaggcggcaatctaccggctgccacttttcgagcgggcggtgcgctgcacgaagtattttgagggctggcactcggaaaagcaccacccgtatgtggggtacggacaccgcttgctgccgggcgaaaggtattcggcacgaaccatgacaaagcggcaggctgacgcactcctgcggaaagacatgcggaacttctgcgcgatgttccggcagttcggaaaagacagtcttttgcttgccacgcttgcctacaatgtcggaccataccggcttttggggagcggaaagatacccaaaagctcgctgatccgaaagctggaggcgggcgacaggaacatctaccgggagtatatcgccttctgcaactacaagggaaaacgccactccatgctgctcaaacggaggaaggcggagtttgcactgctgtatgtaccataaaaggaagtgtgcataaaaaatcatccctgctacggaaatgtggtggggatgataatttcattatgaagctgtcatatatatttccgaataactatattttctgaaatctttttgtatgacatatgtagggtctggaataagcccaactaaatttcttagtctgcttattagttgctaattttgcaatactgtaaaaattaggacgtttataactatatggcaataattaatgataaatttaagcgagcaagattggaccaaagtccatatctgtttcatttcataaatggacgtgaccattctccttgtgatacgttacaaaagattttagaggaaccttaattccgcaacactattacaaatataactttttaagtacctgagcaacaaaaagttgctcaggaatttgccatgtcagatttttcacctatcttagtgttgcaaatcaaaatatgtatcaaacccgacagacatggcaaaggtagcaattaaatccgagaaactcactccttttggaggaatattttcaataatggagcaatttgactccagactctcatctgtaatcgactcaaccctcggtatgagatgcaggctgtatggttatcaatacagcgaaatcatccgttcgcttatgagcgtttatttttgtggcggctcatgcatcgaggatgtcaccactcatctgatgtaccacctttcgcttcatccgacacttcgcacatgcagtgccgacacgattcttagagccataaaggaactgacccaggataacatttcctacacatccgacactggcaagacctacgacttcaacacggcagacaagctgaatacactgctcctcaattgcctattgtccacagggcagctgaaagagggcgaggggtatgacgttgacttcgaccaccagttcatagaggctgagaagtttgatgcgaagcctacatacaagaagttccttggttatcgccctggcgtggcggttattggcaacttgattgtcggcattgagaacagcgacggcaacacaaatgtccgtttccaccagaaggacacgctgaagaggttctttgaaaggtttgaacaaaacaagcttattatcaaccgtttcagagctgattgcggctcgtgttctgaagagatagtggaagagattgctaaacactgcaagaccttctatatccgtgctaaccgatgcagttcgctctacaatgacatctttgccctcagaggttggaagaaagtggaattgggcggcattgagtttgagctggcctccattctcatcgagaaatggaaagggaaggcataccgtcttgtgattcaaagacagaagcggatagacggcgaactcgacctgtgggaaggagaatacacctaccgctgcatccttacaaatgactacgagtcttccgagaaagagattgtcgaattctataacctccgtggagggaaggaacgcatcttcgatgatatgaataacggattcggctggaacaggcttccaaaatcctttatgggagaaaacacggtgtttcttctgcttatggcactcatacgcaacttctataaattcatcatggcgaggcttgacgtgaagaggttcggactcaaagcaacaagccgcatcaagacgtttgtctttaagttcatctctgtgccagccaaatgggtcaggacatcaaggaagtatgtgctgaatatctattcatgcaacaatgcttatgccaatgtgttccagaatgactttggataacaccgacaacttatagtcgtgattttgcgtattgcctcaagtcgcatggtggggtaaggggcatttatatgtctttatggtgacattcgatgcactgtgccccctttttactaacgatgcagattcttttcgcttctgtatcatattaggcgcgtagttgcggatttgaggaggaaaaacaattgattagcgataagggatatatttgtttttcggcatctcccataacagcgattaaacgtttctttgaagtaaaaaccaaaagcaccggacaacctatgtatttaccatggggattaggattttcaagagatatattagttcgtgattttggggcaagaaatgttatttatacggatggtaatgaagatataccagaacacttaaagtggagaactgatatattaaatgtggactcttatgattttgaatatctacgagagtggagaatcaaaggaaaaacatttaatttttctaattttcctcaaggagagattattgttattgctcccgatataaactcgttaaaccatttggtcgtaaagtttgatatgaagtttacaccgtatgtaaactattatactggcgatattgaagaagattggagtgaagaatttgtaagggaatggaaaggtatctcggtagataaattaggagttgataatttattagatgattttgctgtatcaggtgctactatttcacaagaaataggtgaagatatggtgaaaaaactaatatctgaaactccttggaatttactaacaaaaaaataatattatcatagattaaaacttgtttttttgtgaatggcatcgcagattggacagaggtttctttgctactttctttgtccgccatcatgctcaccgaaagaaagtagggcggctctcgccgccgccactcaaaagcgtgtgtaaagtcccgtcaccatcgtgaacatttcttccagcatatcaaaatagatgccctcgtgtacggcaatgtccttttccttgcactcgaaagtctttttgctgaatgtcctgcggtagaaccgcatattgtagaggtctgcccccgcatcatagatgatgtcaaggcggttggcacttgtcttgttccgtgtaaggctcatccgtaagccgttgcccatgtcgatgaaatcacggctgcccgtcatggcggtaaatcttcttccgcctatctgctgtaatatcgtcttggctatcatatccgttgtttttagggttttaagtgttggcggtgcggacaccgccaactcgttcaaaattctcgcatctcggcaatgggtgtctgccgttgcagccactccatattatactcgctcgtgatgactgccgtatggctgtcggtggcggtgaaacgtgtgctttcgtaatcatctatccaccctttgagggtgtccgttccccacgcttgggcatcgtcaaagataccgtccaatgtcgtgataggttcgctgaatttgactatcagcgtttgataggtcgtgttcatcggttgccctcctttccctgctttgcgttcagccacttgttccttgcggttcggcactcgtccaatgtgggtttgacacaagcgaacagttctccgtccgtatggcggtagtcgtactgcacaagtgtccgcctgcgtctgccgatacccgattggaaacgctcatatttctccgtacctgcttccgtacaggtgcttactccgttgatggtcattcgtgttgccataatgttgctttttatatgattaaaaatgtactgacagaactctgttcttcatcaccatttcggggttgctcgtgtagcgttgatgcaggtagaaatggtgttagctacatgtgagccgaagccgtaaaggaaaaacttgtcaagttcgtgcttctcggcaaactccttcacactttttctcaatccctcctcactcgttgtgagagtgaggaggtttacaaattcaatgaacatcgtggggattgcatcatcccacacacaaatcatactttcaattcttacttccatatcaatgttgttttagggtttatgctatgccactttcatccgctcacggataaggttggcgttcttgttcacaatgtctatgatacgttcgtggtattcggtgtcttggttgtacttgccgtggcactgcaccaccttgagtgtccgcaaatccacctctacggtttcaattatctcaccgccaatccttgccgagagtatgagggtgtcggctttcttgtagtattcactgccgaacacgcagatgttctgtgccttgccctcgctgtaatactcgtctatgctttcaagcaccttgatgattatttcctcgtccgtgattaccaatccgaagaatttggatttgttggcgatgaaatcttccgcatctttttccctttgcagttgccgctgttgctcacgctcacgcctttcaatctcccagcggcggcgttgctcggctcgttccttctcgtgtatggtttcaatctttcgggttgcgttgtcgtgtgccgccatgaaatcttcggggcagatgttcttcgggttgcggaggtcttgaccgagtttgttgagcatacgcagatagtcgcaccacatggagaagttgtctatccgatacttgtgacgcttggcaatcagatatgatgtccagcattcatcggcagtacgggcattgaaaagaaagtgtttcataacctcaatctcaccgcctttcataagggtttcaattcttgggtctgaaagcaaggctttgaaaagacgcacgggggaaatgccgtggaaatcgcccttgaagccattgcgtctgagttggggtaataccctcatcttgggatatgcacagcttcttgccacaacatcatcgtataggctgttgtgcggtcttatctccatcgcgctgcacaatgcccatacatcgcagtaatagaatgtgaagccacggagcaacgccatgtctgtaaccttaccgtcgggtgaaatccaacgctgcacaacctcgtggcagtagaagtgcatcggctcgcctttcctgctctcgcatctgacctgcatcacacggattacctgatagcctttgcaggtggttatcacgctgaaatactgcgtttccttgtagatacgtttgcgtgtgtcctgcactttgagtttggcatggcattgggggcaggtgcagccttcaagggtgtcgcacagtgcgctgtcgctgtgccactcgtgaccgcagtcggagcaggtaatgttccctttcttggtgcggtagccgatatgttcaacgcagtggcggtatgcccattcaatttgtgtcgttgatatggggcggaggttggctgaaagtcttgccacctctttctgtatcttggtcttcggtttcataagcctaaatcaaataatgagggttgggggtggttttcttttctcgctgacggtctgttgcggttctgcaacttgcggagttcctcctcttggtatctgcggactgcattctgacgtgcctccgccttttcctcttctgtgagttccacaacatggttcaccaccacttggcacgccataggtttgcccacctctatctcgttttcctcatagtagtggatggcttgcccaaatatctctccgtccgtgaagccgctgcaaccgcttttctgcacatagttcagaatgtgggtcacgcactcgtctatgtttttggcagggttgcggtacttcttcgcaaagagcgtatcttcctcagcccgctgttccagatacatttgtatcgttcttttgaaatggtctgttcctttcatatcgctgtcgtttttagattgtctgtttaagtatctctctccaataggtcggctctacctcgctaagaaggaagtccatgaagtccctccgtgcgtccttgttcagttcgtggtacaatcttcggaaagtgctaaaattgccgttgatgtacgtttccaccatatacacgaagatgttgtccacctcgtaatatctgcactgctgcgctaccgtcttgctgtttctctttgccatgtcggtaagggttaaagggttaataaccaaaggatgaagccgaagtaggcaatggtggaaaggatagccacgattacacctatcgccactcggaacactccgtttacaatctctctgatgatgccccaaaggatgccgaacaccccgaaggcggtgcgcatcatcaagccgcatatcgccaacccgatgtattgcgccacttgtctgaaatttgccgttgctgtcatatcttcgctgtttttgatttttttgttttttatgcggattcaagagctgagggagttgagtttcaaactatcttatctgcctctcgtttatccgacattttttttatgcgtctttctgtcgcatcggtcgttttcgtttcgggtgcttgaaaaggtagggattagggaatacaaggttttccggtcaaaatactacccgcagggctggagatttttaccgaaaacaggaggcttgaccttgctttcccgtcctatcccggaattacctttgcgcccagaacgaaaatgactgactgatgcggctcactgaaaggcgcaaaatggaggtaaacgaaaacagaggcagattgggtagaaaaaacttcaggggaaaatccgtaaaaagaggaaaccgtctgaaaccccgtaaaagcacctcttggcataggcgcaaaaagaaagaggcacagcatcatcagtctaaacatcgtttaggcgtgaggctgtgcctttttctccggctatgcggtagtcggcacacgtttgctcaaacccgttttgggcaatggtgttccgacggacaaaaccgcttttacggaaaaatcttatgaatgaggggataaaaaaatccgggagtttatatcaaaatctcggattaaatagctacttttgcatacgaagagttctttgaaggttacgcaacgcgcagaaggataatgcagtagataactaactaaatcgtaacctattactatcaagagtaattagcctacgctcatttccaataaattacactcttttcgtaacttcatggtgcaaatgtcttgctttttggtggtttgggcttggtagttgcttttatagtagaattgaaaatttctcagaaaaacaggaaagatcatacccgttgaataatgaaagacaattagaaaaaagaaagagatgtgtcaaaatttgaagtaattatcaaaactatccgagctttgcagcaagacaatagcagaattacttttgacacatctctttactaaaaaagaagtgatgaccgctttacatagaatgttgcaatctctgtaaagcggtatatttttttattttttcaaagcagcaatactttcttttaaagaagctattttgctttctgcatcagcctgtttcttgcgttccatatcaataacgttggctggtgctttgctgacaaatttttcattgcttaattttttcaatacactttgcaaaaagccttcctgatattttaaatcagcctccagttttgccaactcttcttctgtgttgattaaattgcccaatggtatggcatattcagttgtacctatcataaatgagccggagccgtcagctttattctctacggcttcgatagaagagaggttacacaatttagtaataacaggattgaatgtagctactggatttacacctactacttgcaactccaaagtttctttctgtgcaatgtttttctgtaaacgaatagtgcggataccaccgattacttctttcactacttcaaattctttgacgataatctcattacaagcagtcggaatgttcaattgctggaccatcaggctttctccttctttgcggtcatatatatgttgccataactcttcggtaatgaaaggcatgaacggatgcagcaacttcagcaagttatcaaagaagcctaaagttttttcataggtcgctttgtcaatgggttgtccgtatgccggcttgatcatttccagataccagcttgagaattcgttccagaataatttgtatacagccatcagtgcttcgctcaaacgatatttgccgaataagtcagctacttctgcagctgtttttgccaacatggattcaaaccattcagtggccagtcttgcatattcgggctgtgcaatatcggcaacttcccaacctttcaccaagcggaatgcattccatattttgttattgaagttacgtccttgttcacataacgcatcatcaaataaaatatcgtttcctgcgggagcggcaagcatcatacccattcgcacgccatcggcaccatacttgtcaattagttccaacgggtcgggtgaattacccaaagactttgacatcttacgtcccagtttgtcgcgtacgataccagtgaaataaacgtttttgaacggcatatcacctttatattcatatcctgccataatcattcgtgccacccagaagaaaatgatatccggtcctgtaaccaagtcgctagtaggataatagtagtttatttcttcattattaggattattgataccgttaaataaagaaatgggccacagccatgaagagaaccaagtgtccagacagtcatcgtcttgacgtaaatcttccattttcagattggcattaccggttttttcttgtgccaacttcaaagcttcttccgctgtttcggctactacataaccgccttcgggcagaaagtatgctggaatgcgatgtccccaccaaagttggcggctaatacaccagtctttgatattttccagccagtttttgtaggtattcttgtatttggtaggatagaatttcagttcatcattcattacaggaggcaatgccatgtctgcaaaatgttgcatcttcaagaaccactgcatggacagtttcggttcgatggctacattggtacgttccgagaaacctaccttattggtataagcttctaccttttccagcaatccggcagcttgtaagtcttgttcaatctgtttacgtacatcaagacggtccatacctatatatagtccggcagcttcgctcagtgttccgttgtcattgaagatatcaatgctgggcaagttatatttttcgccaagcatatagtcattcacatcatgggcaggtgttactttcagacatcctgtaccaaattcaatgtctacgtagtcgtcttcgataaccggaatgatacggtttaccagtggtacaattacctttttgcctttcagccattggtttttcgggtcattgggattgatacacatggcagtatctcccataattgtttcgggacgagtggtagcaactactgcatagcgtccttcagcatcatcttctactttgtaacggagataatacagtttgctgtgttcttccttgtaaataacttcttcatcactgagagctgtcagtgcttttgggtcccagtttaccatgcgtacaccgcgatagatcaaacctttgttgtaaaggtctacgaatactttgataacactttcgctacgttctttgtccatggtgaatgctgtacggtcccaatcgcaggatgcacctagtttacgcagctgtttcaggataatacctccatgttcttctgtccatgcccaggcatgtttcaggaactcgtcacggctaaggtcagttttctttataccttgtccggccagtttgttcaccactttggcttctgtggcaatggaagcatggtcggttcccggcacccagcaggcattcttgccttccatgcgggcacggcgtactaatatatcctgaatggtattgtttagcatgtgtcccatatggagtactccggttacgttgggtggtggaatgacgactgtgtaaggttcacgtccgtcgggttttgaactaaagagtttgttgtccagccaatactgataccattttccttccacgtcagcgggattgtacttacttgctaattccattttatattttatttatttaattgattatcgcataattgagtgcaaaattaataaaagtcgttggattattatgtacttttgcactacaaaatgatattaataaactgattatgcatacaagaaaagaacaaatggaagcatttggccgctttctcgatattttagacgagttgcgagagaagtgtccttgggatcggaaacagacgaatgaaagtctacgtcctaatacgattgaagaaacttacgaactttgtgatgctttgatgaaggatgacaagaaggatatctgtaaagagttgggtgatgtgttgttgcatgtggccttttatgcaaagataggtagtgaaacaggagattttgatattaaggatgtgtgtgactgtctttgtgagaagctgattttccgtcatcctcatgtctttggcgaagtgaaagccgagactgccgagaaggtgactgaaaactgggaacagttgaagatgaaggaaaaggatggtaacaaaatggttttgagcggagtacctcctgctttgccttcgctaatcaaggcataccgcattcaggacaaggcccgcaacgtgggatttgattgggaggagcgttcgcaggtttggactaaagtaaaagaggagatcggcgagtttgaagctgaggtggagaacatggataaggagaaggcggaagcggaattcggtgatgtaatgttcagtcttataaacgcggcccgcctttacaagattaatccggataatgcattggaactcactaaccagaagtttatccgtcgtttcaattacttagaggaacacaccatcaaacagggaaagaacttgaaggatatgactttggaagaaatggatgctatatggaatgaggctaaaaaggaagaaaaatagtagggttagaattgttttttatgatgtgtgttatttttgtcttgcttgtttttctgttttaatcaataaagggtattgtatttattctaggtaatttaatgtatggtgatatcaaattgtgttctataagaatgaggggttgtctttttttatgacagctccccattctttataaaataagttttacatgaattttattctacccattctttgatggcttgtgaaggatcaggatttaaaactgcacctttgttgaatacattttcataaagactgataaagatattcatccagggcgcacagtagccttctattgaattaaatcgatatccgataggagcattagtacctggataaccacgaacaacttgtaactctaaccgtttgtaatcccaaaagatgatcccttcaccccagaattcaatacgtttctgttcaacaaccttcttttgaaactcttttagatcatttactttacatgtatagctacccacagaagtattataacgaaatgtatttacgaaatcttctaatttagaaataccggctgctaatccttggctcattcctattgcttcggcttcgattaaatacatttcctctatacgcattaacggatagtcaacggcagctccgattgtataatcgttcatttctccatttttaggtcggaatttgatacctgtatatggaggcatatcagcgaaatcatcatcggtcaacaaagttttatatttagttccgggagctttgtgtgcatcttcaggagcaatccaagttgtttttcgccagtctgcatttggtatttgatcgaacaattttttgccgataagcttgtatccttgccattttcggttaccgtaaccgaaagtttgttcaggacacatgcttccggcaaagttgagccaatagctatgtacatcctcggtagtcatgatggatccccatacccatgaattggttagtacactgttgaagccggtagtatagctgtctccaccaaaccattccttttcggtcagaggcattgctccgctttcgttaatgactttgcgtgcgtattcggctgctttagtgaaacaagtttcttttgatgcaatgtttaaatctgtattgttgtttagggtgttgagatcttcagggtaaagttcgaaacgagatcccatttccagccacatacgtgccatcagaccatggacaaccggggtacagggcaagtttttggttgggcgttgataatcactcaaaagctcctcagctgaggctagatcatctaatatgaatttgtatacggcatagaagggagcacgtggattattacgcccttcttcttctgtggtttcatcggtaataatgggtacggttatgccatataaatttttactggctgcttctgcatctaatttctctactcctgtttttttatattcatacattcggactaagtccatgtatatcatggctctataagataggcatatacctttataatacttgttttcgggtgcatcatctgctttttctaaagcactcagtgcattatttacattattcagaaacttgtagttataataccaaatggtattgacaacatcagcatcacccaaatcattacatactccataagtatcaaaaaagtcaaatttgggttcgtggcagaagaagtcttcgcatgcactttctctgattaaattatatccactatatccaaaatcatgataaaattgtggaccgtaacttctaaatgcattaataaatgcgactactgagtttaccattgcgctgatagcttggtcagattttcctatttggtctatggtagctgtgctactttctggaaatacctcttcgatacaactgtttaagcttaatgctgatgacagacatgcagcaatcattagtttggtaatatatttctttttcatatttttgattgtttatgtgttgattagaattgtaaacttagaccggcggagaatgcgcgtacggctgaatattctccggatgaatctttatttccgttccatgttacgcgtgaatcgaaaccttttctttttgaccaataataaacattgtcgcaggccacataaatgcgcagattagttagatatagacttctaagtgttttttttgaaaaagtatatcttaattgaatgttttgaatacttatggaagatgcattagttagaaacctgtcggatgtttttacactgtacaggtcattgaattgccattgtggaatatcactttgagtattctccgggctccatgctttataaatatctttgtgaacattatatcctaaatgagttgaagtaggaggtgacattaatgcttggtaaccatagtcgtatgcctgacctcctatactgtagtttatttgtgcagagaaatcaaaaccataaaatgaaagagaggtattgataccaccgtataggtctggaacagcgtcaccacataagtatagatcagcttgagaataggttgttgttgttttcatctcaccggtttgcttatctgtataataccattgtggtttgccttcttcggacacacctgcatatttttgaacatagttagtatacattggaagtccttctccgtaataatacagaccgtttacataaccggcatgtccatctataatgtctgtttttttactttctgcaagacggctgatcttatttctataatgtgttgcattaaagccaatattccatgttacgtttctagtcttgactggtatatattttaaatcaatttcaacacctttgttattcatgtcgccaatattgtcataatagcctgagtaccctaatgataaaggtacggaaaaacggttaagcatatcagttgttctgcgattgaaatattctatgctaccacttaatctgccttttaatagttcgaattctatacctaaatttatatttgtattggtttcccaggtaatatttttatttccttttctggaaaaacctaatgataactcattattgctgttattgatattgtaagtatctacatataagaaatcgtctattctgtcgttaccctgttgacctacagaaaactttagttttaataaatcgagccatttaatgtcatccaaccatttttctttggtaagaatccaagcagttcccacagagtagaaattaccccagcgattatccgggtggaagcgggaagaggcatcgcgccggtaagaaagttggaaaaaatatttgccgtcatagtcgtacatacctcggaataaatatccttcagtattgtatttgctcttataggatgactcatcgttggtaccactgatggcaccgtttaattcttgattctgaaaaaaagagaacatactgtttttggctgcgtataattcttcataaacgttattaaagctttcatgacctgccatcaatgaaacgttatgtaatccgaagctatgattataatttaatatttgttgtaggttgagggttgttcgacgccaatgctggacattgatgcttccattcaaggaatttgctgttccataaaaaggatttaaagcatttttgtaccggctgtcacgtatcgaagtgcctgcattgaatgtgaatttgaagtctttcaggaaattaatatctataaatgcgtctccattcaaagtatttgcagaggtgttatatgtatcaagctgacttaattttattccgttagagttcgggttgatgggacggtttagaggaccttggttggatactccgaaatcgtacatgtcaccatttttatcctgcatgatcttaccatttgtatcacgtaggtaaagcggatatataggggctgtattgaatgcctgggcaaagccgccggccgctgcattctgtattgagtgtgtataactgatattggcaccaaatctcatccatggtttagcctggtaagtcgttttcagacgaccggtaatacgattatagtcagaaccttgtgcgatgccatcttcatctagatatccgaaagaagcatagatttgcgctttgtcacttccaccggaaatattgacattatattcctggcgtaaagctgtatggtatgtggcatcaacccaattatcgggagtgagataataaccgtttactatccgtcctaattttgcattaggattaagaagaccgtttttaccaatcagatattctccttcaggatatgaatatacgttgtaggataaaccgccggtttggctgttggttcctatcatattagtatttgcgctgacatatgcttggtcaggggtttgtccttgggcatttaaataataattgtataatgctttatagtgtgcttgataatattctcctggatcttttatgtagtcatattctatttcaccacgggtattggcactccatttagcgtctactgtgatttttgcatcgcctgctttggctgattttgttgttataattatgacaccgttagcacctcgagcaccataaagagctgtggatgctgcatcttttagtacagaaatagattctacatctgctggattgatgttattccatcctccttcgtatggcataccgtctaatacgatgaggggatctgtttttgcgctcattgaactgatgccacgtatcagaatgcttggagtttcgccaggctgtccatttgtcattgtcatttgtaggcctgccacttgtccagataaactttctatgacattagtaaccggacgtttagttatttgttctgtatgaatcatttttgcagatcctgtaaaagctgatttttttgcagtaccataagcaactaccaaaacttcttccatcacttctgttgttgaagtcataacaattttcatttccggcttgatggttacttcttgggtttccattccaatgaaagaaacaataattgttttgttggtaggtgagatgtttgtaagtgtaaactgaccattgatgtcggtgattgttccattggttgttccttttaccaatacggaagctccgattaccggttcgttgttttcgcttgagataacggttcctttcactgttacctgtgcttgtgcatggcttattcctacgaataagcatacgaatagtagtaatagtgtctttttcataatgtttgtaatagatttgtaagtttatggtttgcacaaacttaggaataaaatctaataaatcaaaatatttttgatggtaaatgtttaaaaataaaagcatattctaatcaatgtaacaaaaacttaataagcaagaaaattaacttgtttttataaaagaagcatcttaagcattttgtcgtttcgctgaactttttaaatacaaaaatccccaaatctaagttgattgatagatttggggaaaaagttagaaatatctcttgttgcttttattttttttgagattggtgcataatttttaagatatcacggtggaatttaatctctgcacgttgcaacttatatattttcttgggagataagatttttttaaagcgctgtagatattccaaatccaatttatcggcttcaatccttgctttgacaataccttctataatttgttcgtattcggcatcggttgttttaggatttttgcctttgcgtgcttgctcccatgctttatcatttactgtttttttacggtcttgtaattcgaagtagatagggaagaatttagtggcctcttcttgcgttatttctgctttgtgcgtgagatatgcttcttgtctagctctgaattcttctttggtgaaaccaggtttctttttgtcttgcgcctgtagcgaaatgcttatatataaagtgataagcaaggttaccagtctttgtatcatgtggttattatttaattatacatatctgaatttgcatctgtcaagtattgatagagcgtataatcatccatcatggaatgatctaaaatcgtttcaatatattcgtctgagaattgttcagtttccgctgctgtaaaaataggagtatcttgtttagggggacctacaacaactctgacgctgaacatcaatccacaaaacatagctgccatatatatccaaggcttgatacgttgccaagtagttattgtttcttgcggagtagaagtttgttccttctccggcaatttattcatcaactcttttgagaagttgtcgaaataaccttcgggtaccatgaatggattttttgtcccgcatttttttaatagttcatcttcttccttcatagtggttctcctttctttgttagatacatttcttttaaaaaggtttaaaggtattcttttaaaaagttctctatttttttcactgcatggtggtaggaggctttcagtgctcctatacttgttcctaatatttcagacatgtcttcatatttcatttcttgaaagtattttaaattgaatactatacgctgcttttcagggagtgtcagtaatgccttttgaaataatatttgagtttcatctccattaaaatatgtatcactttccagtttgttcaccatatctgcatcagcgtcgtctatggataattggttggtggcacgttgtttatttaaaaaggttaagcattcattcaaagctatgcggtaaagccaggttgacattttggcttcggcacgaaaatactctagattagtccatgctttgataaatgtattctgtaacagatcattggcatcttcatgagaaagtaccatccggcgtatctgccaatatagctgttcgctgtattcgttgacaatacattcgaaggcttctttttgtcgtgccgggtcctgtaataaagctattatttctttctcattataagtgttcatgttcctattttttaattagatatccggtttatgttatggtttaatggattctattgaaatttttaatgtttcccgtgcaagtagagtgttaggaaaaatatccgatgcttcctgtaacaatatgctttcatcttcgtagcgggctgaaaaatgtcctataagaagttgttttacttttgcggtacgggcgatttctccagcctgtgaagcagttgtgtgaaaggtttctttcgcacgggcttgttcgctttgtgcaaaggtggcttcatgaaataacaggtccactccgtatatttgttctatgatacgtggcaaataaatagtatctgaacaataggcatatcggcggggaagggcagaagggatagtcaatttgttgtttggtactatttttccgtccggtaatgtgtaatcggcgccattctttatccggttgagttcgtatacggggatttcataaaagtcaatcatgtcgcgacgaatatgggcgggagtctgtttctctgaaaagaggaatccgcatgttggtatccgatgacgtaagggaattgtttctatggttagcgaacggtcgtcataaattatttcagctttgcccggatcaaaagtttggaaaacgactttgtaactcatacctttgcaaaaaaagtcgagttgcggagtaagaagacgttctaattctgcatgacagtgaatatagagtgtggctgtccttcccagcataccgaaagttgatatcagtcccattagtccgaaacaatgatcgccatgcaaatgtgaaatgaatatatggtttagccgggtgaatttcagttttgatttgcgtaattgcatttgtgctccttcaccacagtctatcataaatagtttttcacggatatttacgacttgtgaggtcgcaaaatgccgtgtggtcggcaatgctgacccgcatcctaatatatgtacttcaaatttctccatcgttacaaagatactatcttttttgaatggaaaataaaaaatgccgtaaaaacggcattataggattgaactatttcttaagttttattttcacagcattcataccacgtgaccctttttctagttcaaaagtcacgatgttattttctatgatattgtctatcagtccactaatatgaaagaagtatttctctgcattcttcaaatcttttacaaatccatatcctttggatacattgaagtgctctattcttccttcatgtactagttctatcggttcttcagttctacgaggagttgaaacttcaatggtggacatatccacttcttgtggtttattattagaaatgggaggagtatcggttatcataccgttctcgtccacataggcaatcatatcttcgaaggaggatgtgccgttattttttctttcttcttttttctgctgttttgctaaacgcttttcttgttttttcttttccagatctcgtttggtaaatgaaataggtttcgccatttgattctttttaaattagtaatatacagtccgacctgctaaggggaagtgtatggaattaataatgaggtaataagaaaacgggggagaagtcgttgtgaaatactaactcgaaattttattactctataaagatacggttttattacggatatcccatagaatattttcctttttaagaaataatggcataaaaaaggatgcattttaataaatgcatccttttggcttatcttgaagtaaactgattacttcttcttgttttccaactgttctttcaaagcagccaaagcatcgatatcacctaaagtggtagaagctgcctgattttggatagcaggagcgtcttctctcttagttgttttctttgcattagaagctgctttcttttcagctctttcttctgccttggcagcatcttcgaaaatgcggctgtgagacagaatgattctcttggcatccttgttgaattcaattactttgaatgacagtttttcatccaattgggcttgagagccatcttcttttaccaggtgtttcggagttgcaaaaccttctacaccataaggaagagctactacagcacccttatccaacatttcgatgatagtaccttcgtgtacagaacctacagtaaatacagtttcgaatacatcccaaggattttcttccaactgtttgtgaccaaggctcaagcgacggttttctttgtcgatttccaatacttgaacttcgatatctgcaccgatctgagtgaattcagaaggatgttttactttcttagtccaagacaggtcagagatgtggatcaatccgtctacaccttcttcgatttccacgaatacaccgaagttagtgaagttacgaacttttgcagtgtgcttggaacctacaggatacttttcttcgatagtttcccatggatcttgtttcaactgtttgatacccaaagacatcttacgttcgtcacggtcaagagtcaggataacagcttctacttcgtcacctaccttcatgaagtcctgagcagaacgcaagtgctgtgaccaagacatttcagatacgtgaatcaaaccttctacgcccggagcaatttcgatgaatgcaccgtagtcagccataacgactactttacctttcactttgtcacctacctgcaagttagcatccaaagcatcccatgggtgcggagtcagttgtttcaaaccaagagcaatacgtttcttttcgtcatcgaaatcaaggataactacgttcaacttctgatccagttcaactacttctttcggatcgcttacacgcccccaagacaggtcagtgatatgaatcaaaccatctacaccaccaaggtcgatgaatactccgtatgatgtgatatttttaacagtaccttccagtacttgtcctttttcaagtttaccgatgatttctttcttctgctgttcaagttcagcttcgataagagctttgtgagaaacaacaacgtttttgaattcctggttgattttaaccactttgaattccattgtcttacctacaaatacatcgtagtcgcggataggtttcacatcaatttgagaacccggcaagaatgcttcgataccgaatacgtccacaatcataccacccttagtgcggcatttgatgtaacccttaataatttcttcattttcaagagcagcgtttacgcggtcccaagaacgagtagcacgtgcttttttgtgtgacagaattaactgtcctttcttatcttcctgattttcaatgtatacttctacagtatcacctattttcaaatctggattgtaacggaattcattcaaaggaatgataccgtctgatttgtagccgatattgacaactacttcgcgtttgttcattgcaataacagtaccgtctacaacctcgcggtcgtttactttgttcagcgtaccgtcataagctttttcaagatcttcgtggctcatgctggttacagcttcgccgttttcataagcatcccagttgaaatcttcaacaggagtgatgttttttaaattttccattaataaaattgttaaaattctcagttaattacgttagacattatattgtttatctaatttcgggcgcaaagatacaacaaaatactgaaacacaaacaagtttgctgaaatttcttgctgattaaaatttaaatgggatataatcgttgtttttaatttatgtttgtacatttgtagaaatttaacctattaaaatatggtagcgttcattttagtttgtttctacttttaggttttttatgggagataagaaagaggaaaagtttggaaaaggagttcgttaagaagaaaaataaggtgtgttccgtgaaagaattttcggataccatattgtataatgtggatgcatatataattttggttgatcggaattttttggttgaaaagaccaattactataatttgaataatacttctgaaagataagcggaaagtaatgtccagaggctttaacggttatttgttcaagcctctgaacaaagaagctttgtttaatatgcttcgccaaatggatatttaatcttccaaagagtaatcaatggtggttacaacacggatacgtttgatgtaaggagtattggcatcacgatcctcgatactgaattgtccctgataagctctttttatcttaccaagttcgctgtccgagtccttggcgaatttaatagctgccgcccgtgcgtttttagttgcttcctctatcatttgaggcttgatgtcgtttaaaccggtatagtcatattgcacattgtaacgataatctccaccggtaatagcgataccttgctttaagagttcgctttgttcgctgatcatctttctcaccagatctactttagttgaagtaaccgtgatgacagaggtcacattatagcggaagggaactgaattattattataacgttcagcttgcatgtctataatttccggtgcattgatactgatttcgttttcagtgattcctttctgtttcaagaagccgacaattgtttggttggttgtatttattttgttatataaggtcgggagatcatttcccaggtctttatacattaaaggccaagttactttattagctggcacctccatttctgctagacctttcacattcactactctgtctttaccagagaaagtgtccaatccctgtttgataaaataccccatcatcaacatgcctatagcaaggatgacggcttcttgtttccaacttttcatacttcagtcgtttttagtgatacaattatttgttttgtaagcgtcaaatgcctttttaacagagccctgttcttgcagcaattgttttgcttctgctttattaatatgtaattcgtcaattagcatttgtactcctcggtctactagtttttgattgcagagttgcatgtttaccatccggtttccttttactctgcctagttttatcatgacggtggtacttatcatattcagtatcattttttgccctgtgccgctcttcatacgcgagctgcctgtgataaattccggaccgactatcatttcgatgggtatatctgctacattcgagagtggagagtttggattgctgctgatgcttgctgttaatattccgtgttctctcgctttttgcagcgctcctataacataaggagttgttcccgatgccgctatgcctatcaggatgtctttatttgtgatgtgatgcttttgtagttccatccagcctttttgactattatcttcagcactttctacaggatgtttcaaagcttgttcaccaccggctataatacctatgacacaggtatcaggcataccgaaagtcgctggaatttcagaagcgtccaatactcctaggcgtccactggttccggctcccaaatagaatatgcgtcctccttgatgcatacgttctactatttcatttactagtttttcaatttgtggtatgcaggcatgaacagctgaggctactttccggtcttcttcgttgataccttccagtaactctctgacggatttttgttccatatggacggttgttcggttatttttataaaattcatacttcgaaatgataatcctttaatccttccagtggactttttaaaacttttccgatggacacattcagtcttagagctgcttcttttacttcttcttgaaagtaaaatgcaatagaacctgtaaaatgtacaagaatatcatgatattcgtattgcattacattacgggtgaagaaatcagtgaagcaggaaattaataaattctgtatctctggtctatgcttgtgggcgaaaagaaaaggagtcagacccgccagaaagcggttggctaagggctgtcggtatactttatctaaaatcagtgctggggtcaaatcgtattctttaaggaaatctcggcaaaggtcatcgggaagttggtgtttcaggaagtcacctaccagacgtttccctaatacggctccgctaccttcatctcctaaaatataccctaacggagaaatattagctgttattttttccccgtcataaaaacaagagttggatccggttcctaaaatacatgcaatccctgccgttttaccacatagggcgtgggcggcacctaacaagtcactttcgacaaggatatttgctttggggaagttctgcgccaaagctgttttcactatattcgttttttcgggaatacatcctgcaccatagaaataaatagttgtaaattcagtggtgtctcccaactggggagttagtgtggaggcaatcacttcttttatttcatcaactgattggtggaaggggttgatacctcctgttcgaactgtcctgctgtttgtcttggtgttacccagacaccagtctgttttggtagaaccactatctgctattactatcatatcggataataagatgattattagtcttacaaaaatagtataaatttatccgatatccattgttttccgtatttatttgtcgggctcttatattattttagtaactctgtttctatatttaatttgatgtacaaatagttataattttagtctggtgttcgatttctacccaattttgaccaatttttcaataaagtgtatctgttttgctgctatttttgtgtattcgaatttttaggtatgaaactatgaaacacaatttatgccggacacttctgctttttgccggagtattcctctttgcaactatagatgcacattttaagactactcctcagtcacctgttcatattactgaaaccgacgaactggtttataaatcgtatcctaacggcgatcggatacctgatttttctttttgtggttatcgccaatctgagtatcccattccttgggtggatgcaaaagtatatgttcctgtcgtggatggagatgcaaccggtcttattcagcaggcattgaattatgtagcctctcttcctatggaaccggatggtttcagaggtgcagttcagttagctcctggtaactatgaattgaaaggtaaacttttgatgcgggctgacggagtggttctccgtggtagcggatgccataaaaatggaggaacggttttacgtgcattgggaccgatgaaagatgaattgattcgtgttttgggttataataatgcgaaaacggaagacactattcatattgccgggcagtatgtacctgtaaatgctacggttattcctttgaaacaaactgcaacattgaaggtgggagataaaatacgcattgtccgtccatcaacagccggatggctttcggtgcttggtacggatagattgggcaatgaacaggaatataatttctcgaaatggactcccggtcgtcatgatatggtgtgggagcgtactgtggttgctgttacctctgaaagtattaccatagatgtaccattgaccatgagccttgatcccaagtatggtggtgggtatattttacctctttcatggactgggaggattaataatgtcggaatagagaatttgtgttgcgattctgaatatgatcatactaatttgaaagatgagaaccatcgttggcaggcaattaccttcaatcatgtgaaagatggatgggtacgaagagtggaggctcatcattttgcaggttcggcggtaatggtattggagggagcgatgcaggtgactgtggaggattgtaaatttctgcatcccgtgtccgagatagccaaccataggcgttatgcttttcatactttgggacaactaactctttttcagcgttgttattctgaagaggggtaccgtgattttacagttggggttgccgtacctggacctaatgcttttgtacaatgtcattccgaacggccttatagtttcagtggatctactggtggcttctctaatggtattttgatggataaaataacggtgtcaggaggaattattcaattgggttatcgggatatggcagatcagggagccggttgggtggcggctaactctatgtgctggcagggacgagcttcacagactcattgtgttactcctcctacagctcataattgggcttatggaatgtggacgcaaccttttggtaatggccattatgaattgtcgcatacttttgtcaagccggaaagttttttttatgctcaactggcggctcgtatgggtaaatcttcaatggaagaaaagaaaatatttgtgtacactactgatgaaactacgaagccaactcccgagtacgctcattggatgtctgtacagtcattaaaaccggatatgcgaatggatgtatggatagacagtatgatagtgaaatatcctttggagataacccagaataatgctcctcttttaaacgaagtgaactggcggcctgaaaaagagaagcatgtggtcatggcagaacctttacaagtgaaaaatggctggattgtgcggggaaatcatattctcattaacggaacttattttcgcaagaatattcccggtactacaggatggcagggcaaaggatcactcagtcagtttgttccgggacgcaccggtacgggatataccgaagagccagatagtgttgcgcaagtattattgctttcgggagcacatgtgcttcatcatcgtacaggattgtggtatgagcgtcgtcgtaatgatcatgagcggaatatgcatgctgatgctgaagtttgggctccttttaatgaaatgccttatagccgtagcgggcagggggaagctcaggatcgcttaagcaaatatgatctgaataaattcaatccttggtattggaatcgtttgaagcgatttgtagatgtggcggatcgagacggactggttttgttacatgatcattataaccagcacaatatcatagaagaaggagcacactggtgtgattatccttggcgctctgctaataatataaatcagttgggatttgcggaaaagactgttttttcgggggacaagagagtgtatatggcagaacagttctatgatattactcgtccggttatccgtgaatatcacagtaaatttattcgtcagagtgtaaatgtgttccatgacaataatggtgtggtacatagcattggattggaatataccggaccattgaattttatgaacttttggttggaagaggtcaatgcgtgtgataaccatcagttagtggcgttgacagcaacaaaagatgtgcaggattctgtcttgaaagataaaaaacatacttcaatggttgatgtgattgatatccgtcagtggcattatcgcgcagatggaactttatacgaaccccagggaggggtaagtctggctcttcgccagcatgcgcgactgattgatccgggcacggtatcttgtgccagtgtttatcgtgcggtacgtgaatatcgctgtaagtatcctgataaagctgtggtttataatggtagtacaattagagttcctcgtaatgctatgaattgggctatatttatggcgggtggctcttttgccaaaattccgccgattgatgaattaccggtttatgagaaggcttcttctttttctcctatagatagacagaccgatatggatactcagtgggtaatgggggctgtcggaaagggataccttgggtactgtgtgaagaatgagattaatttggatttgatgggagatagagaaacgtataaagtcttttggattgatccggataaaggaacggttataaaagaagatggtagcgtgagaggaggtggaaaagtaattttaaaggctcctgctgaaagttctatttgttttttacaattgtgattgcaaagcttttgtaaaactgttggttgagtaataggaacggattccaatcttgttcctattacttataagttagtgcttttttatataaacagacttttttaataattgagccaaagcttcattgcagctatcttttctctgcttacagtaattttatctttaaatggcggttttacctgtactattatttttcctaaaaaatagttttctattttctgtatggcatgtacactaaccaatgtttgccggttggtgcggaaaaaaatatctgggtttagttgttcggacagtttgtcgagcgataaatctatgatatgctctttcccttcttttgtgacggcaaaagtaattttgttttcagaatagaaataagctatatcttctacttgcaaggtatacagcttttcgtctcctgatatcaggaagcgggtacggtattttttttccggattacttatatttttcagtaagttcagtaattcattggatgagctcgataggttggcattgccatatctggcagttaatctttcaaacttttcgatggcttcggccaatctttccctgtttattggcttcagcagatagtctatgctgtttacagtaaaagcacgtatggcatattcgtcgtaggcggtggtaaaaataatcatactttccggttgggtctgttctatgaaagtgaaagaaatgccgtcggtcagttggatatctagaaagattatatccgggtgtggatgctcttggaaccattttacagatccctctacgctgccgggtaatacaactatctcccagtctggccttaatcctgacaacattttatgtaacaggcgtcctgcaggaatttcatcttctataatagcggcttttatcttattcattcagcaaaggtattttaacggtgaaatattcagaatcgtcaataattgtgatatgcaagttgcaaatcagcagatagcgggcagataagttcttcagtcccattcctgattttgcaacattcttttttaatttgatcttgtttcttacggaaagagtttgatctttgtcagaataatccaaatggatgaccattggattttccatattgatgatgttatgttttatcacattttcgataagcaactgtagagttaatgaaggaattttcttgttcaataacgtgggggggtattttgttttccagttgaatacattttcccagacgcacttgatgcagatagatatatgaatccagaaattccagttcattacgtaaagtaacaagtccttgttcctgactttttaggatataacgataaacatccaatagcttttgtgtaaaaactactgcgttttccggattgtattctatttcggatattaaagtattcaaactattgaacaggaaatgtggatttaattgattttgtaaagccgtgtattgtgctttgatggaactttcttccagtttcattgttttttcatgcagaataaccagctgcctgtaaaaagcgttcatgatacttaggctcacaatcacaatttctaccaaccatataatcatgatcaagcgcaggcccggactgcttagtacaaatgggaagggcagttccagcaatactttacagatggtcagagtagcgtaattcatgaagaaaagaatagctgcaatcaaaatgcaattgatgatcagtttgtttctcttcttgataaagaatagatagctttttttcagccatcggttgatgaatatcagactaaagcctaccagattgaatatgaataccacagaaataaatcccagaaaggagattaatattttctgatgttgaggcgtaaggtcggtatatagtaccagcgaaaggtatgagaaacatgccagacctgaaaacaggaaaaagttgaagaattgattgtatttattttgcatagccattccgctgctgaaaatgatttgggttattttacaaaactatgaaaaaaagaggaaattcagaaaaaaatagaatactttccaaatctcctcttttatgagcaaacgcttagtatggattaaaaacaaactcctacacgcacacccatgctatttcttccatcttcagaataagtcaggatatcggtttgattggttgcgtagctataatatacggctacatgaaaccccagacgctgataaggtaccggatgaatatctattcccaattcgggtgatacatagaatccccacgggcgttcataccattgtaccagattgttgtaaatggagttttgagaatacatggcacccgatttgactccgaagtaaggtcttacatacctgttatccagtaacttgtaggatacagatattccaaagggaagttggaacgccgattgttgctggtctgttgtcaatgaagccgttggggtgagggggatggtctggcggtccacgtatcggtgattggtatgaaaattaaggaaagctcctatagaccaatagggagtcagatcatattttccttcaaagttcattccccatccgctgaatttatcggcaaagttgctgttcaacggcatattcatctgccagtctacgttgaaatgtacattttcccagatctgtgctttacttgtgaaacaaaagagaactaataacactccgatgaggatacgtttgggagctctgtgttttaatattttcgttttcatgattttccggttttattgtttgtttgacagataaggagattgtgcaaatgcctgattgacggcatttaatgtcaactgcatattgaaatgggagtttccgtatagcagtcctgacgcataagcatgccagatgacaggcagtttgttttggttagactgatcgacaggttgtcttaaatcaaccatttccataatcagggttcctgtgtcatagctgtaagttaccggataaggataataccatcctcctccccagtaaggtccccagaatccggcatcccaccagccgccataccatcctcctgtggttatttgtattctttgttgggcgtatgacaactgaatgcctacattggctttttctttatcttccgtccttacatagcctttctgttccatttcatgggctactgcactgataatgttttgggcattttcatctttccaataattggctttcaggctgttgtccggaaccagaatgctatctggcagataataggtggaaaactcattgaaatgtacactgttgtcataatcggtgtaaacgctgtagtcactatccagtttattcatatccggatctttctcgcacgaagtaactatcatggcaagcatgaatagtggaaatagtagcttcttcatattcctattattttagttaagtagtttatagtgagcgtcctttaaacacattggctttctttaatggcaatatttgaccggataaagtcatgtggctggaattaaagttcggaagaatatctacagtcgcattgttgcttccataaggtatatcaatgcttacttgggctgagattccgattcccatcacgttcatactgacatgaatattaccttttttgtcggtttttactttatagttcgaagcattcccgtctacggtaatacctcctagtccgttcggaccgctgaaaggtacattgaatgctacttgcactacagccttgtcaccgtccagtcctacaaagttggtgttggatgaaacgaaagcggaggttccgtatttaaagtaaactctgtccgcttccagtacaaaggtttggttgtctattgcctctttggcttcctgaaataacattttgtccaaagcttcctgagctgcttttttttcctgacgtgtcatttccttttctgttgtttgtgcctgtgagtactctacgcaggtaaacaaggttactaatgttaatattacaacttttctcataatacctacttttttattttatgttgttttcctattgaaatccggtacaaacataataagctttggcataagtaggtagtaatttgttactgaaacggaaaaactggttgctgaagtgtatttttgaagaactgaaattaaaagtgtgaagaggaatgaatgggaaataaacagccctggaaatctgctttaacaaaatttccggggcttatgttctatgaactataaagtgattagaaagaccttcctttaaatacatttgacttgtcaagcggcagtagttcaccggataaagtcaggcggttggaattgaagttgggccgtatatctacggtggcattgttgcttccatgaggtaatgttatgcttacctgagcagatatacccacccccattacactcattgtcagatacatggttcctttcttgtcggttttgatcttgtaaccggaaacattgccgtctacagtgacacctcctaatccgttagggccgctggcaggaatgttaaacgctacctgtacggatgctctatcgtcgtctaccattacaaaattggtattagaagaaacaaaggcatttctgcctcttttaaatataacccggtcagcttccagtgtgaaagctttgttttctatagcttgtctggcttcttcgaacaaggcttgttccatggctttttgcgcctctttcttttcctgacgtgtcattttcttttctgttgtttgtgcttgtgagtagtctatgcagcaaaacaaggtgacgaatactaataaaataatctttttcatatatgtatcttttatgttattgtttgaatatgaaacaaatataataactgttttgttgagaggactttatcttattttttaggttaaaactcttccttgtcatattctttctagtctgttttatttggcttgagtttgcaagtatagcattattttctgtctttctatcttttaaaaaagattttttcttccgggggctatgtgaacttctatttatttttttctctatagagtttcttttctactgccactgctgccaccttttgtctggaatgctcataaataaaggctttgaggggtgatggcagcagaatatttgaagggatggaaaatgttactgccaccattttaggatattctttttgataatagtaattgcaggaagattgtcaacccggcaaagaaataactcttgaaagagtcaactgatattataactaagtattatctctgtcaaccatccgtacaagtaagatgaaagagtagtcaacctaaagcgttaaactacactgcattcattctacatgccgagttgttccagactgttccattaagttgaaaccgaaacatcatgcggttgaatgtatcagaagataagcatgtattgttcggaagttccttatcttttttcaaaaggagcggaagaattcctctaaatatatgttcctttttgtgggaataattcgagtcttgatgagaaaagtattataagaggtggtggcagccttttgggtatctaaaaaatactgctgccaccacctctataagatgcttatatctagattgttacttctgataaaagctcagtagtggtagcagaaatgaaaaactctgttggagaaagagggcaaagtctcagtttgtagatgtattcttcatcatcggcatcaatcttttttttttgccgaattccggatcaatctttaacagtgccgtcaccccaaaggttacagcgcaacatatcataatccagataaagaaatggttgtatcccatctggtcctgaagccaaccggcggccattccgggaatcatcatgcctaatgccataaatgcggtacaaatggcataatgtgccgttttatgttctccgtccgcaaaataaataagataaagcatataagctgtgaaaccgaatccgtaaccgaattgctctataaaaatgcaaatattgataaggtatagggaatcgggttggacataactgaggtaaacatagactaaatcaggtaaggaaatagcccataccatcggccacaaccattgttttaaaccgttacgggctacggctattcctcctaaaatacctccaagggtaagcccgatgatgccgactgttccttgtacgaaacctatctcctcagtggtgagccccaaaccaccttcttcaataggatctataaagaaaggaatacacatttttgccagttgtgcttccggtaaacggtagagtaacataaagagaatagcaatacttgcctgctttttctgaaagaaactggcaaaagtgccaaaaaattctttgagtagggtagaagcggaaacttctttagctgcatggtctgaatccggatggggaagaataaacttatgatagatccacactcccaggaaaagcccggccaatacaaaaaaggtgatggaccaggcgtaaggtatattgtctgttacaatttccagtcttcctgcaagcatgataagcaacccttgtcctgcaatagtcgcaatgcgatagaaagtactgcggattcctacaaataaagcttgctggtgcgagtccagtgccagcatgtaaaaaccatcggcagcaatgtcatgcgtggcagagctgaatgccaacaaccagaaaattgccaacgtaagttggaaaaagtgttcggtggggatggtgaaggctatgcctgccagtcccgcacccattaagagttgcatagtgacgatccaccagcgtttcgttttgataaggtctatgaaaggactccacaaaggtttgataacccagggcagattaagccagccggtataaaaagccagttcggtattgctgattcctaatcttttatacataatgactgaaatagtcatcactgccacgtagggcagcccttgtgcaaagtatagcgtgggtatccatgcccacggtgaagtatgtttgtttttcattattcctttttcattttaaagattccggatggaaatcctatccggcgcatggcttggtggatcggttaatagaaacggcggatatctgcacctttataataatgcaatagaatttcgtcgtaggtatatccccgttcccccattacggcagccccgatttggcacaggcctactccatgtccccaaccggcacccgttagcagaaaccattcggggacgccgtttttcaattctcccttatctactacaaaggctgaactgaataggtgggacgaagacagggtacgacgtatctccaattcttttccgatagtcaatgttttcaaagaacctacaattttcagtttgcagatacgtccggacttgccacgttggatgggaatcaggtcgatgatgtctccataatctgattttgtattttgacggatcagttcggctagctctgactgggaataacgcactttccaacgatagaaatctgtggtttcctgatcgtaattgttcagtatttgtgaaattacttttttatcgtgggtatcacagaacgaaacgggagaagtacgtatccaacgttctgcctcttcttctttagtcagatcgggtaacggacggttttcttcttcttccgtatcacggatggtagacaaatagggataattcttatcttcccagcaatagccgaattcctcacttgcacctccgcaacatttagagaaacgagcatcgcagatgccgcgttcatacattagtaattgccctcgggttgcctgtactgcttcagttacggcagcactggatgccttggttattccctgataacgttggcaatgatcatctgcacaaacgtcgaatatggtgtggtcttcccggtcgtaccaacggatatattcggtatcggtcttgataaaggaaaagaaaccttcatttttgccacttaaagctttgcgtttctctatttgagcaaacagccagctgcgtgataccacggcatgtgctttcagaaactctaaagaggaggtggcgttcatctccgaagagatgacgcttatcaaatagtcttcggcgggaagaatattgatagcggtgattttgccttcgtccaccactagtttcagtgttcccataaaactttgggtttcttgccgttcccagtggaaattaattccgatggttacgtcatataatgaaaacgaggcatgttcgtcttgtggagtgaaggtcagttcgcggtaaagattaccattccacagaatacctccttcgctgaaggctacttgttgttcaccacagaccgtttctcctttagcgaaaaaattgccgttcagtgaaaaatgaatttcttgtgcgtttactattcctacgcttatttcgggttctttcattgttattcgtcttgtttatgggcttgctgtaattccttcatctcttcgtgttctctctatctttttgctttctcgtcaaaataacgtccgggtatcttctcggcttcttctactgttattcccacttcttttatgatggatgccactttttcttctgttattttgtcgaaatcttcctgacgggtggtgacgattacgccagccatgtccaaagctcccggactgatgagcatctgttcgctgccttttgcaaagtagcagtcgggacggtgcttgctgcggggaaaaaccaccgtatagtatagatggccttccttccataacagcaggttgaacttcgcttcttgtccgtcttcatccggtgggaaagcggcgagggcgctgtataacagggagtcgtcataatgcgtgttgcttgagaggattaccaaaggacagggatagtccttggtgttgaggtaaattcggctacattctagtggataatcttcctcttcttctaggtagggaaaatacatgctgcgtatatcgattgtctgtgcgtgggttatcagctgttgtacgttcgggatgatgggaacatcagtttttctgactccttgaagatggagatggtccggtgcagaggctccgcaatgtgctccattatagaatagggcgtagtccggatatttctgtacgaatgcacggacgtcatcgtaactgaaaatattctcatccatgagttgggggatgtgatctttatgggcgatagtgaggtgatccggcaatatgggataagggttaacgcatattctgtttgcagtgatggtttccagtgctttctgctccttaggctggttttccttgcacaggaaacaggggcgtgcttggatgctgtccttatccactttggcggtagtcgaaaccgcacgctgtgcattgcactgtaccacaaacgtgtagccgtttatggacagttccttggtctgtacagtctgtaatgcctcgtggttgtggtgtgccagtggccagcacgccagttggctgtctataaatcgcttgatttcattccggttcttcagctcttctgtatattttttgcggattcccagttcacgggtgcgcaggctgtctttgtagtgattgttggcattggtctgctctatgctcagggcggcatccgagttcccttcccagcggcggcacagatagagtacatcatagattcttcctatcttatattggcgcgagaaaatgagtcccagggcataatcttctccgtagctgatattgggcacgcctgtttcgcgcaggataggtgtgaagaatgcgcgcggagctcccagaccgttgatgcgcaatgcgttattgtgtccgttctctttcgtccactcgctatggtctatcactcccggagcgatggtgttcagccggaagtccgtcatgcggtaagttcctattaccatggcgcattgctctttgtagaacgtgtctacgatggtttgcagggtatgggtgtcgctgtacaggtcatcgctgtcaagctgtatggcgaagcgtccgcaccgggggtggttgattgcgaggtcccagcatccccctatgcccagatcggtacgttggggctgaaggtggattaccgctttgttgtccttgtattgaccgatgatttctgtggttccgtctgtcgagtgattgtccacgacgatgatgttgaatggaaagcgtgtttcttgtgtgagtgccgaccggatggcatcgtcaatggtacgggcgcgattgcgcacggggatgatgacggaggcttcatattcgaaatttcctttctttacatccgtttccacacatatgggttcaaggagggcattgatggatttcaagtatcgtgtgaatgcttcttccatttctatctgtacttccctgttacggggatttacgtagtcgaactgcttttcgccggacaggcggttgtcgctttctgtttccgtataaagatattcgttgatatgtaccagatgagaatggagggtaaggaacagacgcagttcataaagggcggcatactttctttcctctgtcatttggagactggcgaggatgaattccgttctgttgaatatcagtagcggaccgaagtcgaaatcatcacgcacactgccgggttggtagtcgttgacgggatgtttcttcttttctccgtttttccattcatgatggtcggcatagaccatgccgcattctctgtcctgcaggaagtccgtcatgcgttccagtgccttgtaagccagttccaaagcagaagttttggtatagagcaatatataaggtgtgtctgctttttcagcaatcatcttcattgtcttagaactggttagtgaatcaacaggtaatatttcgcatccttcgggggtggataatgtcttgttgggttcgatgttcagcagatagattttgttgactatgctactttcttttagagcatggattgtctgttctgccgctgtgctttccctataaggaataaagcaattaattgtttttctcattgttaaaaagtatttctcacggcaaagataggtaatatatcttattttttctctacctttgtacgctaattgtcttttaaatataaatggaaactccgaaaacagcattacttggcaggacattggatgagattcaacagattgtgaggaatctgggaatgcctaaatttgccgcaaagcagattacgtcttggttgtatgataaaaaggtggaaacgatagacgaaatgaccaatttgtcattaaagcatcgcgaaacattgaaagaagggtatgaggtgggagcatctgctccggtggaagaaatgcgttcggtagacggtacggtgaaatatcttttccgtacaccggctcataattttattgaagcggtttatatacccgatgaggaccgggctactctttgcgtttcctcgcaagtgggatgcaagatgaattgtaagttctgtatgaccgggaagcaaggttttacagctaatctgagtgcccatcaaatattaaaccagatctattctattcctgaaagggaaaagctgactaatcttgttttcatgggtatgggagagcctttcgacaatctggatgaggtgttgaaagtgcttgagattctgacttcagaatatggttacggctggagcccgaaacgcatcactgtttcttctgtgggtttaaagaaaggactagagcgctttctgaatgaaagtgattgtcatctggctatcagtatgcatactccgattccttcgcaacgaagggatttaatgcctgccgagaaagctttttccattacggaaattattgatatattgcataattatgattttagcaaacagcggcgtctgtcttttgagtatatcgtattcaaaggggtgaacgattcacttatttacgctaaagagattgtgaaacttttgcgcggcattgaatgtcgtgtcaatttgatccggtttcatgccattcctaatgtggatttggaaggggtagatatggaaataatggttgccttccgtgattacttgacgcagcatggcgtatttgctacgatccgtgcttcaagaggagaagatatttttgctgcttgtggaatgttgtcaacggctaaacaacagaaggagaaaggtgttacattacagtaaataacaacaataataccatataattatgaaacgaatagcattttatttaagtttggtgctggtggttctggtactggcttcttgtaagaagggacaaaagaacttgtttacccccacgtccagcggtagaccttacgaagtattggtcgtagtaaataaacctgtatgggaccgtcctgcaggacgtgcattgtttgatgtattggataccaatgtgcccggactgccccaggcggagcgttcgtttcgtatatcaaatgtggaccctcagcattttgaccgtgtgctgaaaatattccgtaatatcatcattgtggatattcaagatatttatactcagcccaaactcaagttttcccgtgatgtttatgcgtctccacagatgattatgacaattcaggctcctaatgaagacgaatttgaggaatttgtagcaaagaacagtaaagtgattatagatttctttgtgaaagctgagatgaatcgtcagataactttgttgaaacaaaaacatagcgatgtgatttccactaaggtaggaagtatttttgattgtgatatctgggtgccgatagaactggctaactataaagaaggcaaagattttttgtgggcttctactaatcgtgctacagcggatatgaattttgtaatgtactcttatccttatacagacaaggatacctttactaaagattatttcattcataaacgtgattctgtaatgaaagcaaatattccgggtgaacgcgaaggaatgtatatggcaacagactctatgtttgtggatgtggaagatattgttgtaaaaggagagtatgcgcaagaagctcgcggattatgggaaatggaaggtgacatgatgggaggtccgtttgtgtctcatgcacgggtggatcgtgctaacggtcgtgtcattgtggttgaggcctttatttattcaccggataaattgaaacgtaatctgatgcgtcagatggaagcttcactttatacattgagattgcccaatgaaagcttgattgacgaaattgtaattagtggtaatattccggaagaaaaaatagatacaacaagccgggtaaagtaagaagagacattataatatataatatagatggaagataactacaagatacgagttggtattactcatggggatatcaacggagtaggatatgaagtaattctcaaaactttttcggatcctaccatgctggaactttgtacacccattatttatggatcacctaaagtggctgcttatcatcgtaaagcaatggatattcaaacaaatttcagtattgtcaattctgcagatgatgctcagccggataaactgagcatcgtgaattgtacggaagacgaattgaaggtggagctctccaaaccgacaccggaagctggtaaagcagctttggatgcgttggagagagctttgcaggactatcgggagggaatgattgatgttttggtaactgctcctatcaataagcataccattcagtcggaaacttttcatttccccggtcatacagaatatattgaagagcgtgtgggggaaggacagaaagcgttaatgattttgctgaagaatgatttccgggtagctttggtgactggtcatgttcctgtacgcgagatagcacaagatattaccaaggaacttattatggaaaaattggctgttttccatcgttctttaaaagaggattttggcatcgacagtccgcgtatagctgtgttttcattaaatcctcatgcgggtgatgagggattgattggtacggaagagagtgatatcataattccggcaatgaaggaaatggttgctaaaggcattcagtgtttcggaccttatccggccgatggctttatgggatctggcaactatactcattttgatggaattctagctatgtatcatgatcagggattggctcctttcaaagctttggcaatggatgaaggagtgaattacacggcaggacttcctattgtacgcacttctccggcacatggtactgcgtatgatattgccggacaaggggttgccttggaagattcttttcgccaggctatctatgtggctatggatgttttccgtaatcggattgtcgaaaaagaaatccatgcacatccattgcgtaaacagtattatgagaaacgggatgatagcgataaactgaagttagataccattgatgatgaagattgatggtgaaccggtctaaaatataatttcaagaaaaagagtagaaatgaaatttgcaattatatcagcgggtgaaggctcccgactttcacaagaaggggtagctttacccaaacctttggtgcaactgaacggagttgccatgattgaccgtctgatacagatctttgtgcgcaacggggctgataaggtggtcatcattattaataatgaaagtccgttgacaaaagagcatttggcaaaactacaggcggaagcgacagtgccattggaagtagttgtgaaaactacgcctagttcaatgcatagtttttatgaactgaactcttatttgaaagacgataagttctgtttgactactgtagataccatattccgtgaagaagaattctcgacttttattgaagcgttcaaacaatcggacaaagatggatatatggcggtgaccgatttcatagacgatgaaaaaccgctttacatttctacagatgaagctttgaacataactggctttcatgatgaggccatctccggatgccgctatatatcgggaggaatttactgcctgactccgacagcggtcaagacattgcacgggtgtatggaaaaaggtatgtcccgtatgcgcaacttccagaggcagttagtggccgacggcttgaaattaaaagcttatccttttacaaaaattctggatgtagaccatgccagtgatatagtgaaagcggaaaactttctgaccggtaaggacgagtaatttaaaagataacataaaggaatgaatgtgatttcaataataggggtaagccgtggaaacgaatattcacccaatcatgtggacaatgatgccgccatatttaataaggtggtggaagagttgggacaattgggctgtgaagttgaggtttatgccgagaaggatttcgtggagcagggtgtcaaaggagatatcatttttgatatggcccgtgataaagcaacaatagcccgcttgaagtctttggaggatggaggtgcgttggtgataaactctgcttacggtatagataattgtgtacgtagacccatgacggagctacttataaaaagaggagttcctcatccgcagagttttattatttccacagcagacgagtattctgaaaactgttatccttgttgggtaaagcggggagactctcatgctatggtgaaagaagatgtagcttatgccacttgtaaggaagaggtggagaatattctggctgattttcgcaaccgtgacattcctgttgcggtcatcaatgagcacttgcaaggcgacttggtgaaattctatggggtacacggcactgatttcttttattggttttatccgtctccttgttcgcacagtaagttcggtttggaaaaaataaacggaatagccaaagggattccttttagcgtagaggaattgaaaatacaaagtgataaagctgctgaggcgctgaacgtacccatttacggaggtgattgtgtggtttcagccgacggaacactgcggattatagattttaatgattggcccagctttgcccgttgtcgtgaggaagcgggaggtaaaattgcagagtgcatttataaccgggctaaaaagcaaatgaaacaataaagacatgagtacagagagtgagaagaaaggaatagaggcttctttcaaatccatggacacagaggagttcctggatatttatttcaatcgtcccataggatatgcatgggcgctattgtttaaaaaattgaaggtacatcccaatgtcgtgaccattttttctattattctaggtataggcgcaggcgtgatgttctattaccccgatatgaaacataccctgattggtatacttctattgatgtgggcaaaccattatgacagtgcggacggccaattggcacggcttacagggcagaaaacccagtgggggcgtatgttggatggctttgccggtgatatttggttctttactatttatgcggcgatctgtctcagactgatggaccagcctatgccgtttcatattggtgacgggatgcattgggggatttttatttggatattggctgctttttcgggcactgtttgtcatagtaaacaatgtacattggcggattattatcgtaatattcatttatattttctgaaagggaaaaatggaagtgagctggataatttcaaacaacagcgtgagatcttctatagtttaccttggaaaggaaatttctggtggaaagcttttttgtatttttatggtaattacacacgtcagcaggaaagaatgacccctaattttcagcgtttctatgctttggtaaaggaaaagtatggggacaatattccacaggagttgcggaacgaatttcgtgcagctagcaaacctttgatgaaatataccaatatcttgacttttaatacacgtgccattgctttgtatatcagtttgctgattggcgaaccttggttgtattttgtattcgagattattgtaatgacttctttatttgtatatatgcgccattgccacgaggcggtttgcgcacagttatattataaatacgcggcgaagtgaaaagtaaatatagaaatatattcctgatatttgggattgtagctatcgtggtaatgctctgtacttttgatatggagtatgatgaattgttggctaacttgcgccgggcagggatttggctgccggctgtagtagggttatggattatcatttacttgttcaataccctttcttggtacattattatccgagatggaaaaaaaggaacgcctattccattttggaaagtttataagcttacagtttccgggtttgcactgaattatgctactccggtaggattaatgggaggagaaccttaccgtatcatggaactgactccttatgtcggggccagtaaggcaacatcatcagttatcctttatgtgatgatgcatattttctcgcatttttgtttttggttttgttctattttcttgtatttggctttacgcccggtagatattgccatggggactatgctggctgttgtgggtgtggtttctcttttggctatttatttttttatgaaaggatacaagaatggaatggctgtccgtactttaaaattattacaatatattccttttattaaaggatgggccaaacgtttttcagaaaacaaacgggagactttggaacgtgtggacagtcagatagcagagctgcacaaacagcgtaagtctacattttatgcctcgttaagtctggaattcatggctcggattctaggttgcctggaagtgtatttcatattgaatattctgacaacagatgttagctttccggcttgtattctgattatggcatttacttctttatttgctaatttgttctttttctcgcctatgcaattgggcgctcgtgaggggggctttgctttagcggtaggaggactggctattccgggagctttcggagtttataccggattgataacccgtgtacgtgaattgatttggattgtaattggtgtgttgttgatgaaagtcggcaacggtacacctactaataaagcatgagataatgaacgcattgaaagatattcagggagttatatttgattacggcggtacgatagatacgaatagccgtcactgggcggaagtattgtgggccaagtatgtggaacatcagattccggtggataaggagagttttcgtgaggcatacgtctttggagaaagagcgttggctaaatacccttttgtccagccttggcatgattttcatgatgtactttccattaaggccaaacttcagatggaatggttggcagaacagagaaagttgcctatggatgagttgaaactgcaatcttatgccacgaaagtagcagacagctgttatgagtatgtattggatatattgcaggttacacgtccggtagtggaagagttgtccaaaaaatataagttagtgctggtttctaatttttatggtaatattcagaccattttaaaggattttggacttctggatttctttgatgaaattattgaatcctctgtggtgggtgttcgtaaaccagatcccgctatctacagactcggagtggatgctatgggatttgtggcaaagaatgtgctggtggttggagattctttctcaaaagatgttgttcctgccaaagcggtgggatgtcgtgtagcttggttgaaaggagaaggttggggaggagaagtcattgacgactctgttcctgatgtgattataacgaatttggcccaactgcctgttctattataaaaagtatggagacacaaagacatgcattggtaaaaagggactatctagttccttttgttttagtaacctctttattctttttatggggatttgcacatgctattcttgatgtgctgaataaacattttcaagaggtgatggatattacccgtactcattcggcaatggtgcaggtaatgttttatttaggttatttcgtaatggctgttccggcagggttattcatcaccagatatggatatcgtaggggagttgttttcggattattgctttacggcatcgggtcgttgatgtttattcccggcgaatactggatgtcatttgaattttttctgttctctttgtttgtcatcgcttgcggcttggtttttttggaaacggctgcaaatccttatatgacagaattaggggatagggaaacagctgccagtcggttgaacctggcccagtcctttaatggattaggatgtatttgcggccctttggtgggaggactattgttgttctcggagaagggagaggcgaatatttcatatccttatatgctgatgggggtagttgtgctgatagtggcactggtcttttcccgtatcaaacttccggagattgttcatacagacaatgtggtgaatggaaagacagttaaaaaaggcttatggtcgcataaattatttttatttggtctactggcactattcagttatgaaatagcagagatttctatcaatagtttctttatcaattatgtggtggacgatggagggatgaatgcccgtgatgcggcagtagtgctttcattcggtgggctcgggctatttatgtgcggacgttttgccggtagttggattatgcagcgaattcgtgcagaaagagttttgctatactgtgctttgggaacggtagcggctacttttcttatcgtttgcaatttaggaaaaatttcattagttgctttgtttttggtatatgtgttcgaagccatcatgtttcccactatttttgccatatctttgaaagggttgggaaataaaaccaaacgagcctcttcttttttaatgatgtctcctgtaggaggagctattggccctgtgttgatgggatatgtggcagacaatagtaatatgtccttatcattcattataccatttgtttctttttgtgttgtattattctattcgtggtatgccgatgtagaaggaaactgaaataaaaaatcccgatatggctgtctggctttatcgggatttctatctatttttaaatttcctcggctttcaaaggactagtccggataatatcccatacatcttcttctgttttgctgaagggaccggatgcttctaatttcagtgtcgacatggctgctgcaaaacaaccggctttttcataggatactcctttgttgcgcatatataaatatcctgtggcatacgtatctccgcatcctgtagcatcaactatatctttaggaggataggcgggtatcttatgaaatctaccttctgcataaattacagaacccagacttcccaaggttatcaatacctcttttactccccattcagcaagttgcaaagcggcttgttttatgtctttgtgaccggtaagcacttccatttcgtgttcgtttacctttagaatatcaatatattttaaggcttccaacttgtctgtccaatctatgggataaactctttcaccccggacttcgcgcaaatatccttgggcatctaccgccaaaatacctttttctgaaagatattttacaacatccagtgaaaaatcatctgccagaaggcttcccaaatgaaaaatatgggcatttatattctgtagctgttccactgtgaaaggatcggctttagctaatacccgctgactgcggttatcttgattttccccgtatgtattctcgaaatagactgttcgctgactgggaataacagtgactctgataccttttgcacggatatcttctacagctttaaattcactgggcgctagtgctgtgaccagctgataatgctttgtatcctttaaatgactgattccgtgtgaaaaataataggatgttccgccgggcatataagtcgttttcctgggtgttactatcttatctaatgtaatgtggcctatgcaacaaatatcatccatacctatttatattaaacggttgcaaagctacaaaaaaaactagaaaaagcatggaagttttcaaaagaaggtgtaactttggcacaaattatcttaatctctgctatgagatgcaattttaacaaagaaattagaatggaaaaaatgaatgtgaaaccggcaaccggtaaattgggcgttctttgtgttggattgggcgctgttacttcaacttttatgacaggtgtgctgatggctcgtaagggactggcaaaacctgtcggatctatgactcaatatgataaaatgcgtgttggccgtggagaaaataaaaagtatttgcattatggagaaatcgttccattggcaactttggacgacattgtttttggtgcatgggatgtttatcctgctaatgcttatgaatcagctgtaaatgctgaagttttacaagaaaaagacattcttcctgtaaaggaagaactggaaaagatagttccgatgaaagctgctttcgatcacaactatgctagtcgtttggatggcgataatgtgaaagattgcaagaatcgttgggatatggtagaacagctgcgtgaagatatccgcaatttcaaagctgaaaataattgcgaccgtatcgtagttctttgggctgcttctacagaaatctatgtacctgttgaagaaaaagtacacggaaccttggcagcattggagcaagcgatgaaagaggatgataaggaacacattgctccgtctatgtgctatgcttatgcagcgctgtcagaaggttgccctttcatcatgggagctcctaatactacagttgatatcccggctatgtgggaattggctgaaaaaacgaagatgcctattgctggtaaggacttcaaaacaggccagacattggttaagtcaggcttcgctccgattatcggaacccgttgcttaggcttgtccggctggttttctacaaatatcttaggtaatcgtgatggtttggtgttggacgaaccggctaacttccgtactaaagaagtcagcaagctgtctactttggagtcgattcttgtacccgaagaccagcctgatttatatacagattattatcacaaagtacgtatcaattactatccccctcgtaatgacagtaaggaaggttgggataatatcgatatcttcggatggatgggctaccccatgcagattaagattaatttcctttgccgtgattcaattttggctgctcctttatgtttggatttagtattattgagtgacttggctgcacgtgcaggacgttttggtatacagcgtttcttgagtttcttcttgaagagcccgatgcatgattatacagaaaatgaaatacctgtcaaccatctcttccagcagtatgctatcttgaagaatgctattcgcgaaatgggtggttatgaagctgatcaggaaattgattaatttataacagactgtttttattcaggcgcggattgcgcggatttcacggtttctctttataaaagaccgtatcaatccgtgaaatccgcgccttattttttatttttctgccataattacttgctgtctgctcgggaatttgtaattttgtcatataataaaatgaatatggtcaggtcagaaatacaaaatgttaaactcagatttggtattattggtaatgctgaaggattgaaccgtgccatagacgtggctattcaggtggcgcccacagatttatcagtattgatcaccggtgaaagtggtgtgggaaaggaaaattttccgcagatcatccatcagttcagccgtcggaaacatggacagtatatagccgtgaattgtggagctatacctgaaggtacaatagattcagaacttttcggacatgagaaaggtgcttttacaggagctatcagtgaccgtaacggttattttgccgaagccaatggtggaactatttttctggatgaggtgggagagttacctcttgctacgcaggcgcgtctgctacgtgtgctcgagagtggtgaattcattaaagtaggttcatccaaagtacaaaagacggatgtacgtattgttgccgctaccaatgtaaatctgacggaagccattgccgaaggccgtttccgcgaggatttatattatcgtctgaacactgtgcctatcaagataccacctctgcgcgaacgtggagatgatataacattacttttccgcaaatttgcatcggattttgctgagaagtaccgtatgccggccattcagctgacagaagatgcaaaagccttgttgttggcttacccatggcccggtaatgtacgccagttgaagaatattacagaacagatatctattattgaaaccaatcgcgacattacggcggaaattttgagaaattatttaccggaacaacgtgtaaactccggtttacccgctttatttggtgtgaaagcaagtgcggggaaggcttttgaaagtgagcgcgagattctgtatcaggtgctgtttgatatgcggcgtgatgtaactgagttgaagaaattggtaaacaccttgatgtcggaacgtggagcgcaacctgttccgccaccggctactacagcagtttcttattatcaagaacctcaacggaatttggtcgctacagtagtgcctgctacacctaccattatctctgccgctaaatccgtgcatcctgtagtagatgatattcaggacacggaggaatttgtggaagaagcgacactgtcattggatgaagtggaaaaagaaatgatacgtaaggcgctcgaccgtcatcatggaaaacgaaagaatgcggcaaaagatttgaatatttcagagcgcacactttatagaaaaataaaagaatatggtttggattaaacaattgaaagtagttggtgtgttgatggtactggcgggaatagtaactgcttgttccatctcttataagtttaacggatcgtctatagactatactaaggtaaagactatttcgttcgaaaacttcccgaaccgttcggcaggttttgtgtggggaccgatggagagcatgttcaatacggcattgcaggatatttatatgcagcagacccggttgaagcaagccaagcgtggaggtgacctgcaattgtcaggggaaataaccaattatgatgctttgaataaaggaattggttctgacggttattccagcatggtggaattgcgtatgacggttagggtgaactttgtcaacaattccaatccgacagagaatatgaatggtcaacaattctcggctagccgagaatacaacgctaatcagcagttgagtgctgtacaggatgaattagtaacccagatgattaaagaaattgtagagcaaatattcaatgctaccgtggcaaactggtagtgagcccttttccgtcatgacacaacagcaattatatgaatggataacccatcctgaattattaaatcgggatacactatacgagctgcgtacgttgcttgcgcgttatccgtattttcagacggtgaggttgctttatctgaagaatctgtttttactgcatgatataacattcggtgaagaattgcgtaaggctgcattgtatgtggccgatcgcaaagttcttttttatctgatagaaggggagcgttttatcatttctcctcttgacaagcaagagaagcttaaggaggaaggcggattggaccgtactctttcattgatagatgcttttctgtcttctttacccgaggactctgctgccgtggagttgcctatggatgtaacagccgattatacttctttcttattacatgaagaagagcatccgtccgatgatggtattcctcggatgaaaggccagagtctgatagatgatttcattgaaaagtctgcagaggaacctttattacctcaattagggataaaagaggaagtgccggtgaaaaaggaaatgcccgaagaggatgaaccggaagcggaggaagatatagaagatgaaagctattttaccgaaacattggccaaaatatacgttaaacagcaaagatattctaaggctctggaaattattaaaaaattaaatttgaaatatccaaaaaaaaacgcttactttgcagaccaaataagatttttggagaaattgattattaacactaaatcaaaataaagaaaatgtatttattacttattggattaattgtgcttgcagctcttttgatgtgtttcgtcgtactgattcagaattcaaaaggaggtggtttggcttctagttttgcttcttcaaatcaaattatgggagttcgtaagactacggattttattgagaaattaacatggggattagctgcttttatggtagcatgtagcgtgcttaccgcttattttgttcctactgctcatacagattcttctatcatcatggaagaagcggtgaaagagggagctaccaatccgttgaatgcaccttcaggttttgctgctccgcagacaaatgatgctgcagagactcctgctccgggtgattcggcacagtaattaaagagagcattttccttaataaggataggcgttctgttttatcagtgaaacagagcgcttttttgttttaagatattttgctttgataagtatgcttttgtgcttacttttgttctggaatatgttagtttaaaaataataaaagaatcatgttgaaattcatatcatggaatgtaaatggcttgcgagcttgttacgataaaggttttgctgatgctttcaatcgtttggaagctgattttttctgtttacaggaaacaaagatgcaagaaggacaactggatgtacaatttgaagggtatcagtcctattggaattatgctgaaaagaaaggatattcgggtactgctattttttctaaagtaaagccattgtccgttacatacggtttaggcattgaagagcacgatcacgaaggccgtgtaattacgcttgaactggaatcgtattatctgataactgtttatactcctaattcgcaggaagaattgcgacgcttggattatagaatgaaatgggatgatgatttccgtgcttatttgaagaaattggaagagaaaaaaccggtaattgtgtgtggtgatttgaatgtagcacataaggagatagatttgaagaatcctaaaacgaatcggaaaaatgcaggtttcactgatgaagagcgtgcaaagttcactactttgcttgaatcaggttttacggatacattccgctatttctatccggagcaagagggaatttactcatggtggtcctatcgtttcaaagcccgtgagaagaatgcgggttggcgtattgattattttctcacttccgattcgttgaaggataaattgagaggtgctcagattcatactgacatcttgggatcagatcattgtccggtggaattgacaatagaattgtaaaaatgggctaaaaaaactttgtagttgtcgcaaaatgaatccctgattatctgcaataaaaagataatcagggatttgtgtcgtcgcaaaacttattctgttttattctcataaatcatggattcctgtatatctttgtttcgggaaataaatatttttttcctgaaaaactgattgaatctatgaaacaatggcatttattttgcttgttgcctttgatggcagcttgtgactccggacattccggttccggagaattaatttcggtggacttgcgacaggggatagatcatccttctatgctcaatctgcaagatgaggtagagagtgtggaatatatacctttggaaacaaccgatgatcccgcttctttgttggatggagtatccgaatatgctttgacaagcaaatacatctatgtttctcccgtaaaagaacaacggattgttcagtttgaccggaaaggtcattttataaagacattgattcctttcggacaaggaccgggggagttcagtaattttttagcaggtatacaggccgatgaggaaaataatcgtctttacctgttcagtgctaatcagataggggtctacaccttagagggggagtttattcaaaatttgaaccatgattatcagatagtatatcagcgtaaggtggaacaagactgttttgcttcggtggcatttccgtatattccttttcggagcgggagttatggcttaggcatattcacagagcaaggggacactattgctgtaaagaatgattttacttcgccactggttcctccggagaaagcaggttttactataggcattgcagctacctattcaggtaagcagcagtcattactgtttaaaacaggatgtaatgatactgttttcagaatttccgatcataaaattatgccagcttgtgttttgaatttacagaattcagaccaagaaatcatccgctgcctggatgcgactgatttcagtagcttacatcaaaaatttggaggaaataaggatatttttgtgtctgatctttttgagacgccacgaagttattatttccgttgcaggtatgatggaggacattatgtggtttccgttgataaagaaacagggaagattctggcggagcaatgtgagcagcctgaagatatttttaaactttctgatgccaatcttctttttggtatgttggggacacggagttatcgtagctttcccgtttggggccgtatggagaaagatggtttggtgcaggttgtcattccttatgagctgagtctttatgaaaaaggatccacccttactgttccggatgaattaaaaaagataaatgtggatagtaatcctatttttatagtctataaattgcgagaaggctaaaaagtgatacatttgcgatatgatgagaaagtacttgtttataggctgggctgtatggatggtggtgatattgggtatcatctcctcttgcagtcaggataagggcacttctagactggcatgggggaaatattatttgtggagtgccccggattcctcctaccggatactgaatgccattccttttcccgataaactttccgtagaagaacaagcgtgctatgcattactgatgacacaagctatgtatagatgtgggcataagatatcttccgattcattgataaacattgctgtacagtattattcttcacaaggtaatgcagatgataaagcttccgctttgctttataaaggatatattttagaggacttggggcaggataatgaagctttgtatgcctataaacaggcagaggaggcggtaaagactgttaaggatttgcggatccattttttgatatatacagctttagggaatatcaatggaaggtatgctcattatgagcactcactgtcgtattatagaaaggcgttggatcttaatctatcagttccggcttggaatgcaatggggggagaatatatatttgctcctctttatctggctcagggaactccccggtacaatgaagaggtcaagttggtttatgataagtttttaggtttggttaataggatggactttacctcgcaagagaaaatctattatcaatgggccttgaaggagaaagacaagcaggaatgggattcggcggcttcgttcctgttaaaagcgatggactataccactactgttgagtcccgttactggtatgatgctgaattagctgttatctataaacatttaggaaaaactgaactagtagacagccttcgtaatagggcattgaaatcttcgcgaccacttttgagatcctctgtgtacaaagctatataccaggatttgctggcggctggtaagttaagtaaggctaatgaatatatgcaatgctatatcaatgaactggaattactatttacttccggaagccgtactgaattgtttaaaatcgagaaaagatatgattacacggctttattacgtcagaatgatgaatatcgaagccgatggagcattactctgttgataacagtggcagctgttttttcattgactttactgctatggggtagttggaaattttttcgccgccagaaactggagattttaagtcattataaaagggatgcttccatgttgcagcagcagattgatgatttacaagagaggatagaagagaatcaaggtgaggcgaagaatctgcaagaacagatgcaaatccttgaaaaggaaaagaaaagtaaggaaatacgtattcgtcagttggaactcactttccgttcgaaacacatctcgcttccggttgagtcggtggaggcagcacaagtatacttgcaaatcgtgacgaagggaactcctcattatacccctgctgaagaccgtactaaattagagtattggttgaacatatcccgtaatcgctgggccgagcgattggaaaagctttatccatctctgaccaacggagagaaggatatttgttacctgtttgtagtgggactttcatttgatgagatagccagtttgttgggagtgcagtcccgttctgtaaaccgtgtggtatatagaatttgtagaaagatgggtatagaacaagggagcaaagatgaatttgtggcacaaatcttccgtttggatgattgcgacacaaatatatagcttacatggctacttcgatggccagtatttgcgcttcggatttagcttcaattgtgacactttcaatgtcccagataccaataccgtcacgacgtgaaagattctcgcctgctacatttatttctccttctataatgaagatataaacacctgtgcgtggtttgtgcatacggtatgtcacactttgtccggcatccaatgtgcccatagagaaccatgcgtcctgtagcagatgcgccggtgtattgccagatggtgagatgaaggtggctagttcgttacgtttcaataacggacgaatgtcataattatggtattcgggtttagttccctccacattgggaataatccagatttgcaggaattttgcgtcttcagtcttactggcattgtattcgctatgatagatgcctgtgcctgtactcattacctgaatttcacctggggcaatggtactttcattctgtacgctgtctccatgtcttaaatatccttgtaaagggatagacaccacttccatatttttatgggggtgcataccgaaaccttctccgggagctactgtatcatcatttagtacgcgtaaagcaccgaagtgaattcgtcttggattataatagtctgcaaagctgaatgtatggtaggtttttagccatccgtgattaaaataccctcttgtattagctttgtcaattactgttttcataactcatatcctttcttttttaatttgttgatatttgatataacaattgggaaacagaaaagtttaacggttgctgtaaggtgggttgtactttagattcagctcttttaaatgatctgttagagtcttttgttacattagaaaacacattttgtttcggttttagtgaagatttttggagaacactctatggtaagaagcttttggtttagcagacaggtaaaaagataagttcgtttttcaaaaagggccttatctttttttaaaagaccttattgttttggaaaaacatccttatcttttaatgaaaggaacttatgtttggcacaagaattcatagaacttggcgcaggatccggcagaatttgtatcaagattctgaacactccggtaggaggaaatgtagcttcttgaaaccggacaagggctatcgaactgattgggaaagtaaaataaagcaatgtgatgattgattgcccaacagaagaaaacgaatttgtatgtatacatttgtttttacgaacggaataaaatcctttcatcaccatatcttattgttgttcaatggtttactgtgtagaaagatggtaagacatgcccaagtggtagttgacggtgaatatgccatacacttttcgcttccggaaccagacgggcatggcatgttcttggagcatgttgggcttgtccggggtcaaaccacttgagcgtcttttacgtccttttatcaccacaaattactggatactaattgattatagtgattgaacaattttatttttcatgtaaagacaattcggatgctggcaacttgagtagttaatcttacagttcatacatttaaatcttatagcttatagataacttatgacgttgtccacagaacaagctaagcatgttcgtcaaacaagctaggcctgtcctttggacaagcccggcctgtacgtatgcatgaagctatacatatgtatgcatcgcctcatgcgtacgtacgtgtaaaccggatttgcattttcttcttcccaaaaagcgttccaccctttttcactttatgccggaaggttttttcaaactatccttataggtttgacgagttttgctcagagtttcccggagttatgcttgaagttttatcagattcacctattacttgcagagggtctgtcacaaaaacgggacaaagcaaaagtgttcctctatgaaatatcggatgaacctggtttcttggagccgaacaagaattcttggacatcctgctcttataattatcgggtaagtgaaggaagggtaggatataaaataaaagaagagatgatttaatcatctcttctgtagagcggaagacggggctcaaacccgcgaccctcagcttggaaggctaatgctctatcaactgagctacttccgcaatttttgtgggcaaagatggattcgaaccaccgaagtcgaaagacagcagatttacagtctgccccatttggccactctggtatttgcccattcgctcttaagattctatctcaattctcttattgagtaggtttgtttctcaattgcgatgcaaaggtacgtcttttttttgaatatgcaaattctacaagaactttttttcaaaaaatctgctttccctgcactttttgcttgaaatcgagcattttgatggcagttattgcacattcatctcctttattacctaattttccaccggcacggtcttctgcttgttgcatggtattggtggtaatcaaaccataaattacaggaatatctccttcggcattcagttgggcgatgccttgggtagtaccggcacatacataatcaaagtgtggagtgtcaccacgaactacacatcctattgcaatcactgcgtctacttttccgctttttatcatttgtgcggaaccaaaagtcagttcaaaacttccgggtacagtttgtaccaaaatattttcatcttttgcaccatgttttttcaaggtggttacggcgccttccaataagggaccggtgatgttactgttccattcggatactacgataccgaaacgcatgttttctgcattgggaaccgagttaaagtcataatcagataagttatgatacgctgttgccattattttttgttttttagtgggattaataaaagaaaaaggttatctgtacgtgggtgcagacaacctctttatataattcaaggtatatttcttttcttatttgatagaggcacgctcgatatatttgtcgatgtccattgactgataagaattgaagtatttttctttcaccaatgtataagctttaacagcttcactgttcttacccagtttctcgaacaactgacctgcctgaatcaaatagatagggcttaatgcctgactgtctgctttgtctgctgctttcagcaaagttccggcagctttgtccaattgccccatctcagcgtagcagttaccgatagttcccaaaatagcggggcttaccaactgatctttagcgctgaatttatctaaatacttcactgcgtcttcatatttgcctaactgtgcgtagcagatacctgcataagcatttgctaaattaccggcagctgttccgctgaattcatctgctactttcaagaaacctttgtaaccaatgctgtcgccgttcaatgctgtttcaaagttatcggctccgaaatattgttctcctttgaacaaagcttctgatgctttcatttcattgggttcagaaataaaatgcttatatcccatgaaacctgcaatgataatcacaactgctgcaatagttccaaggatttttcctttgtacttgataaggaatgcttctgaagtactcagtgcttcttccatatccaatgggtcctgagtgtgtttttgttctgccatttttatatttacttttttattattttgcgaatctactttttcggtcagcaaaagtagttcatttctatgtattaatgaaatttacgggcatatttttttagtttttcccgtttttatctctaattttgtatcctcaattaaacagaagttctatgatactgaaacgcatctcgatattgaattataaaaacctggagcaggcagaactggaattctcgccaaagatgaattgttttatcggacagaacggcatggggaagacgaacctgctggatgcggtttattatctttcattctgtaaaagtgccactaatcccatagactcgcagaatatccgtcacgagggcgatttttttgtgattcagggtttctatgaaacgaatcaaggagatcctgaagaggtatattgcggcttgaagcgtcgtcagaaaaaacagtttaagcggaataaaaaggaatacagccgtttatcagatcatatcggttttattcctctcgtaatggtttctcctgctgatgcggaactgattgcgggaggtagtgacgagcgccgccgttttatggatgtggtgatatctcaatatgataaggaatacttggatgcactgatacgttataataaagcgctgacacagcgtaacgccttattgaagtcggagcaggaacctgatgaggaattgatgttggtatgggaggagatgatggcatttgcaggcgaggttgtttttagaaaacgtagtgagtttatagccgaatttattcctacttttcaatctttctactcttatatttcgcaagataaggagaaagtgaatctggcgtatgaatctcatgctatgaatgggaatttgctggatataataaaagagagccgcaaacgtgaccgtataatggggtattcgctgagaggaattcataaagatgacttggtgatgcagttgggtgatttccctataaagagggaaggttcacaagggcagaataaaacttatctgatcgctttgaaactggctcagtttgattttttgaagaaaacggggagcaatagcactcctttgttgttgctggatgatatttttgataagttggatgctttccgtgtggaacagattgtgaaactagtggctggggatagtttcggacagattttcattacggataccaatagggatcatctggataaaatattgaaaaagattgaaagggaatatagggtcttttctgtagaagatggctgtgtgactgaaagaaaggaagtggctgaatgaaacgtaatgatgcggaacaaataggggagatgattcggaaattcttccggcagaatgctttggaggcaccactgaatgagtatcgtctgatacaagcatggaaagatgttgtggggcctgccattaccaaatatactagtaatctttatatcaagaatcaaatactttatgtgcatatcacttcgtccgtgctccgtcaggagttgatgatgggacgtgatttattggtgaagaatctgaataagcaggtaggggcacaagtgatagtcaatattatttttcgttaactaggcggtcttctgtatgttcttttggttatctccgaaggttcctgtaaaacttcctgccaggtgcggatttttacggattttccttcatctttttcgtaaagtccacacttgacttgaaagaagtgtgatgtaagagtggcttatggggccgttcttatcacgatagattctatttcagtattccattctcagtccagacttcatccattctccggtcgaaaggttcgacaggcagcttttcgcttacttggaagttataacatatacctatattataggaatgaagaagaggcagtaatttgtcataatatccttttcctcttcccaatcggttgccttgggcatcaaaagaaacacccggtataatggcgaggtctatcttctcatacgctgtaaatgcttctcccgtcggttcctctatgtgataagcctcgccgtttttcaggttttgtctacctgcataaatacggagttccaattcgtctcctttgactaccggcagcaaaattgttttctgccggtgccatttttcaacgaagtcatgtgtctgtacttcatcacccaatgaataatagagcaaaacggtacgggccgatgcaaatttgggatgctgttccagtttctcaagcaaagcagcggactttgtcattaattcggtgatgtcgtgacggcgtttttcttgcgctatctgcttgcgcagttgtttttttagttccttcatcgcttactttcggttctatgggttgttcgggagctttgggaaatgattcacctttatccaatacttccaatgctttgaggacagttttgtcgctcttgtttaagtattctatataagcttccatgcccagcatattataaatgatgtttccatataaatttgtttcaaatagtttctgtgatttgtacatcaatatgttgcgacgttttaaccctttgctttcagcgaaacgggcgaattgttccaaaatgttctgatgtttcaaatattgcaacaggctttcttctgtttcatatttttgcatttcggcacggtggttgtccgtatactggaaagcaaactggatggttagtccgcggttaacggccatacgataataggaagtcacaccggtagtatcctgcggtacaaagatatcgggcataatacctccacctccatatacaggacggcctaaagaagtttcaaagatttggctttgatcctgtttgatactgtcctgtgagaaaaattctccgtgttcgtaacgggtcaggatatccatttcataatttgcgtcattaccttttacatacggtttttgtatacagcgtcctgacggagtatagtaacgggcaattgtcagacggatggctgaaccatcgctgaaatcgataggctgttgtactagcccttttccgaaagagcggcgcccgatgattgtccctcggtcattgtcctggatagctccggcaaaaatttcgctggcagaagccgatccttcgtccatcaatacgacaataggcattttctggctacttccggttccgttagatgtatagttctcacgtggagacttacgtccctgtgtataaacgatgagtctgtttttgggtaagaattcgtttaccatctggattgctgcacccatatatccgccggtattaccgcgtaagtcgattaccactccttcgcagtttgcctgatttagcttggctaatgaaatcaataattcgggataagttgtttcaccaaacttgtttacttttatgtaaccgaatttgtcattcaacatataggcggcatctacactctttaccggtatgtcaccacgaacaatggtgaagtgtaaagtttctttttctcccggacgaaaaacgccaagttttacctcactgcctttgggacctttcagtcttttcatggattcatagttggtgacaatttttcccacaaaggcactgtcatcaacttctataatgcggtctcctgccattaggcccactttttctgatggtccgccttggatgacactgtttacatggatggtatcttgctggatggtaaactggataccaattccgctgaagctcccttttaaatcagaatttacagcttccaggtcttttgccggaatataagaagagtgagggtccagctcgcctagaatttgcggcatagcatcttccaccagttcacccatgtttactgtatctacatattggtcgtcaatgatacgcaataatgcattcagtttgttggatgaagtattaatgatacctaatttgtttcctgaaaagtggttggcgtaaaaagttccaatcaatattccggctacgatgcttaccgcaacgattaccggcataaaacgggatgttcgatttttgctcatatctttatttgctattattcattgggattgatatagattacttcaatatttgcgcgtttcaataaatcaagcccgtcttccaaacggtatttttctgagtaaactacacgtttgattcctgcttggatgatgagtttggcacattctatgcaaggagatgcggtgacgtacatggttgctccgtcactgctgttgttgcttcgtgctattttggtgatagcattcgcttcggcgtgtagcacgtaaggcttggtgactccgttgtcatcttcgcatacattttcgaatcctgcaggagttccattatatccgtcggagatgatcatcttgtcttttacgattaatgctcctacctgacggcgttcacagtatgaattttccgcccaaatactagccatgcggatgtatcgtttgtcgagtttgagttgtttttcttctttcgtttccattatttcagtcttgcttattatgtgcaaattgaatataagtttttttcccttcgggagctagcaataaaacattgctgtcaccttgataaaatattgcattattcaatgcttctatgaactcgttattatagcttgttgaagatggagtcttggtaaaatttatgtttactgtccggtcttttccatccgcttgccatgtgccttcaatggttccgttttgtatgcttcctgtaaaagtgccatccgctttgaaagtaatgttgaaaccatgaatgatatccaaggcttttcttccttcggctgcgatagtcttatccgggttgtgtgccattgcattgtatttgggctctccgttccgtttgtcccaattggctttaccatagaaatccactacatgccatgtgccgcttgcaaagatttcctctacatcgtcttcattgttgcaactccataagaaggggagtagcatcagtatataaagaatagactttagtttcatattgtttagttttttagttgattattccatttcttttcagcaaggcatggatactgggttcttgtccacggaagcgtttgtaaagggccatcggatgttccgttcctcctttcgagagaatattctcccggaaagaagcagcgacttcctggttgaagattcctttttccttgaataaggagaaggcatccgcatccagtacttccgcccatttataactgtagtatccggcagaatatccccccgccatgatatgtgagaactgtacggacatgcaggtatcttctactccgggcagtatttgcgcttttttccatgcttctttttcataagcgcggacatctccgtcaaatgtttcctggcgggtgtaccatgccatatccagtaagccgaaacttatttgacgtaggcaggcgtaggccacattaaaattggatgcatctacaattttttgaatcagttcggcaggaatgggttctcccgtctgataatgtctggcgaatgtattgagaaattctttttcagtggcgaaattttccataatttgtgatggaagctccacaaaatcccagtatacgctggtaccactcatggttgaataagtggtattggcaaacattccgtgcaaggcgtgtccgaattcgtgtaaaaaagtatttacttccgagaaagtcaacaatgccggttttccagccgatggcttggtgaagttcatggtaacggatacgtgggggcggctgttgactccgttttctatccactgttccttatagctggtcatccatgcacctgaacgttttccggcacgggggtggaaatctgtataaagtacagccaggaaacttccgtctttgtcgaatacttcataagcttttacatcgggatgatagaccggaatttctttattttctttaaatgtgatgccatacagacgggtagccagaccaaatacgcctttctctacttggctaagctcaaaataaggacgcaactcttcttcattcagattgaatttcttatttttcagtttttctgaataataggcccaatcccatggcatcagctggaaatcattgccttccatttcgcgtgccaatgcttctacttctgctacttcctttagggcggcaggggtgtaggcttccaataattggttgagcaatttgtatacggcatcacttgtttcggccatgcgctttttcagtttatactcggcaaaagtggagaagcctagtaaatgagccagttccatgcgaatgtttaccaattgcttgatgatgtccacattgttgtagtcgttattgtgtgtacattgggtattataagccatatagacttctctgcgcagtgaacggtcgtcacaatatttcatgaaaggaacaaaactgggagcatccaatgtaatgatgctgccttcttttcccttgtcctttgctgtttgagcataactttccaatgaactttcgggtaatccttccaattgttttttcgtcaatgccaattcgtagttattcgtttctttcaacagattctgagaaaaacgtaaggttaatatgcttaattcagtattcagttggcggaacttttcttttgcctcaccggtcagattggcaccgcttcttacaaaactgtcgtatgttttttgcagcagttgggcgtcttcacctttcagttgcaactggtctttctgctcgtatacagcttttatgcgggcaaacagtttttcattcaaactgatgttgttgctgtgttcagacagtaagggcatcattttttctgccaattcctgcatctcgtcactagtctcggcactcatcaaattgccgaaaacagtagttacgcggtctagcaacgcacccgaattttccagagcaacaatggtgttttggaaagtcggtgcttcgggattattgacaattgcatcaatttcctcattttgttctttcattccttccaacaaggcaggttcataatgttctatcttgatgagatggaacggagccgtgtcatgaggagtgttatagggttttaaaaatggatttttattttcagtcatggcactattttatttgacttacaaatttgctaaaaaaaagtatcactatcctcattctatttacttatttaacaaagtatattaaatagttaggttaaaaataaaaaagcacaagcagaaatgcctgtgcttttcatctttatgaggttttacctgattatttattcttttcggtcagtttttccaatgccggaatggagattgcttttctgctaagttgtaccaatccctgttcctgtaaatcattcagtacttttgacacattgattcgtgtctcatcaatcaaactcgccaaatcttccattttgattttaagaatttttttcccttcgggcttcatggaacgcagtactaaaaaattcagtattttttcttctgtattacctatgtggctgttccataatttttcgtatgccacttgtgccctattactcagaatatttaaataattaaggcggaagatttcgtagttgttcagttcatttaatacaaataacttatctatggtaactatgttaatatttgtacgtgctttgtaagtcgctgtatagttggtctgcatgccgaataatgaatagggctctataacgaaaggacttccaaaagtttcaaataaggagtatgaatgttggttatcggttgcttgggaggttatctccccatttaagagaaagattaattgagtgcaaggtgctccttgttccacaatgatatcatcggcgttgtatttacgaaaatgtagctttaccttacctatgatattggtgaagtcatttttacataatccctggaagagaggaagttgtaaaagtgtatcatacattgttatttccataagttctaatgttcgttaagttatagtttaacacacaaaggtaacgataaaacgagatttattatttataggtgggagaacttttattttttttattgtttcttaccgtctcctaatgtttaaaagcagaatacttgcgggctgtataaaaaataaatatatttgcattcaaaaaaggaggagtttatgtttggatcatttgattttcaagaatttttaagtgcgtttatcgtactttttgctgtcattgatattatcggatctattcctattatattgaaccttaagcagaaagggagaaatgtcaatgctaataaagctaccggcatttcttttgctttattgataggtttcttttatgcaggagatatgatgctgaagttatttcaggtagatatcgcttcgtttgccgtggcgggtgcttttgttatttttctcatgtctttggaaatgattttggatatcgaaatattcaagaatcaaggtcctatcaaggaagcgactttagtccccttggtctttccgttattggcaggtgcgggggcgtttactacgttactttcccttcgttcggagtatgctcctgtaaacattgttgtagccttgatattgaatatggtttgggtttatgtggtgttgaagttgacagatcgtatcgaacgtttcttgggtaaaggtggaatttatgttattcgtaagtttttcggaatcattttgttagcaatatcagcgcgtttatttacggctaatctgactttgttgatagaacagtttcagaaagctcagtaatatgctgtttctttgcagataataatgtcggaactcaccatagatattttattggaaaccaactgctttgtgttaaattgatattaatctgtggtgagttctggtattattccatttgaatgatagttgttcgatgttttgatgcgcctctttgatgtctatttctcgctggcgataaatttcttcatcccatctgtaaaataagtttcatatttatccccttcgcccgagcagataaaataggcatccagttcaggatgtgcttcacaaaaagctttggctgagtccagtcccatcaccatgaaagcagtagcgtatgcatcggcactggcgcaatcttttgcaatgacagtggatgacaggatgctatgttgtactgggtatccggtgcgtgggtctatggtatgtgcatatttctttccacctttgtaatagaaattacgataatttcctgatgtcgccatacctacgtcactaatggcaagtacagtctgtaactcctggtttactgacaaggagtcatctacaggtttgtttatgccgatacgccaagcgttcattttggaatttttgcctcttaccactacttcaccaccgatgtctaccatgtagttttttatccctttacgttctaatagccttgctactgcatctactccgaatcccttggcgatagcgctgcaatccagcattatacgagggtctttttttattatccggttgttctgtaagtctattttttgatatcctatcattgggcgtaagctgtccactatcagtgaatccactcctgtagattttttgaatccaaatccccatgcatttaccaaaggtgcgacagtgatatcaaaggctccatgggtttcatcggatattttttttgcgagatggaatacatgtacgaaaaaactgtcaacttctgtcttttcattgtggtttacgcgggtgattacagaattcggattgaaaggagagagggagtagtccactttcttcagttcggtttctatttcttctttcagattatcttcggactggtaggtgattttgtatacagtaccgaatacaaagccttcatccgtacggaaaggtgcttgcttttttagaataataattgttcctattatcagaattgctagaaacggcaattgccatgctaatttttttttattcatacctgtattttagttaagaaagaaataaatgttctattaagattttaacaccgataataatcagaaccaaacctccccataattccatgcgcaggttgaaacgcttgccgcaaaatacacctatcagacttcctaatgttgagataacaaaagaggtaaagccgatgatgacaatgggagaaagaatggaagtgaaagagttcattcctacaaaagcaaatgatataccgatggccaacgcatcaatgctggttgctatagccagcgtaacaaccacttttaatttagtggggtcgaagcagcatttgtcttcattgctgaaactctctttaatcatacgccctcccaggaatgccaataacccaaaagcgatccaatggtcgtaatcctctatcaggtggctgaagcggctggcggcaaaccaaccgataagcggcatgacggcctggaaaagaccgaagaagaatgccataataaaaaaagtgcgccagcaaatgcgacgcatgataattccgcttgttatggaaacagtgaaacagtccatagcaaggctgatggcaaggagccatatttctaaagttgtcattagttaaaatggtaatttgtatattaaactgtatgttactcctaagttagtcgagttgttctttccgaaaccgggaatataccaaggctcggtgtgttccgtctttttcatgttcatgcgtatgcggtagcgcagtgaccagcccatatagaaattcttgtatacatttacctttattcctgccagcagttcggcccaggttactgtggttttaactccctcataactgaaggggatttccggaaatccccatgtagggtctttcattgtcggagcatctacatcgtatgaaaaagaggtgaatccgtaacgtatgcctccatacagaaaaccaggcagatagggcttcttgaaaaagaagttgtagttcatgcctatgcggaaataaggagctgaggctttataatgtatattggtaccgtcatcagtagtgtcggtggttccatatccaatttcagctacggggacataacggtttttcaaattgacctccacgctgatttctgtacttgtaatgtcacctccaaaaattttgcttcccaggccaaatatatctacaccgatagtagttccctgatagaagggtaccttttcttcctctatggttgtttttttttcttgtgccgccagtgtggggctgtacaacagcatactactcagtagcgttaacaacgtaatatatgttgaaattctttttttcttcattattgatgtccgaatttacaatctcgatagattttaggttataggtggtgtatttaatgtcttccactttataaaacatcatggtgccacattctatattctgcaagtaggggatattctggtgaatgagtgtgattgtgtcacgcatcttttccgtataatgcaatacgtaggtagtttttgatgtataactcaaaggtaggctcatactgctttccgctttattgaatatcgtgtcattcatcaatgagtcttttactacagtttccttaatagttccatcttccagtgtgtcacgtacaatcacatcggtagtgataaatccagtgacgtcaaaagctggactgaatttcacagcttggtgtgtttctgcatccagaaagtcgaaatgggcaaaggaattggtggtaagcggacaatcgctttccccacagctttgcatcaaggtgcttacggtaatcaggagcaataagataatggctggtagtctcttcattttaaaactctttctctattttataattattgcgttcaggagcattccgggctatcagttctcctatgaatcctgccagaaacagttgggttcccaaaatcatcaaagttagggccagatagaagtaaggagaatcagtaattaatatataaggtaaaccatgtgacaaggcatatagtttgtttgctccgatgataatgacggaaatgaaaccaagaataaacatcaatgatcccataaacccgaagaagtgcatcggcttgataccgaatttggataaaaaccacagagtgatgaggtctagataaccattgaagaaacggtttaatccgccaaattttgttttaccgaatttccgtgcctgatggtgtactactttctcggctatcttaggaaaacctgcattctttgccagataggggatatagcggtgcatttcaccgtatacttcgatgttctttacaacatcacgacgataagcttttagtccgcagttaaagtcatgcagattcttgatgcctgagacggcacgtgctgtggcgttgaatagtttggtcggaatggtttttgataacgggtcatagcgtttttgcttgtatcctgatactaagtcgtagccgtcttctgtaatcattctgtataattccggtatttcgtccgggctgtcctgcaagtcggcatccattgtaatcaccacatcaccttgcgccttttcaaaaccacaatacaaagcaggggacttgccgtagttccggcggaatttaataccttttacgttgtccgattccgagcgtagtttctcaatcacttgccaggagtggtcggtgctgccgtcattgacaaaaataacttcatagttgaagtggttggcatccattacacgttgaatccatgcgaatagttccggcaaagattcttcttcgttatacaaaggaataactacagatatatccatcttttattcatttttctttttacgcatcacgatcaatgccgtagggatagccattagcatcccgtaaaacatattttgtgatatcagttgaaatgtcatttccagcggggtaagtcccgacagtaaatctatcgcttcttcaaattggtttagtgaggttgtcagttcgggtccggcagtttctttgaactgatttaagatggagcggtatgcctcgaatacgaacccgccatctatatagcggaagtagatgtaatgcactaccgctacaaatagagaggcgaacatatacataaaggtagtgaatagaaacgcacgtgaaaaagtgatgcttccgccacaatgccgttctctgaactttttggcaaatatgtatcctaaaaagggtactcctatagttaagactataaaaagtaattgtaggaaaggtattctcaatcctagtgggaagagcatgaatttgaaggcccataaaagacccatgcccgtaccatagcgcatggcgcattcctgcaaagtcggtttataattcgtcattctttattaataagtgcacaaaagtacttcttttacgggaatccgtcctatagttatgggtgaaaaatgtattttttctgctaaaatcaaaaaaaagtattcgaaagtattgtagttttgaaaataatgtctacctttgcactcgcaaaacaaaaatgggtaagtcctatacggccagctcctgatgaatcctccagggcttgatcgcagcaaaggtagttggttgtagcggcgcgatatagtaagcttacccacccgcctctttagctcagttggccagagcacgtgatttgtaatctcggggtcgttggttcgaatccgacaagaggctcagaaaagcgagaaggacgaagaaatcttcattcttctcgcttttttattatatttgcgctgatattagttttaaggttggtacaaccgttatttaagagttcttttgtatgatagagtcacagattgcggcaagagtattgccgtctaaatgccgtgaagcggtaaaggttcttttgcaggaagtgtacggatatgaagatttccgtaatttagaagtttatgatgacttgttcaaaggtaaggaaaaattgcaattgtctcaagggcaattaattgaggaagtcatcatggaagctgaaaaagggatcaagggtgattcgtctgttcataatttgctcctgactgctccgaccggagctggaaaatcattgttgtttcagctccctgccatttatctgggtaatgaatataagcttcttactcttgtggtttctccgctgaaagcattgatagtggaccaggttgaggcgttgcaggagttaggatatgaacgtgtggcgtatgcttcgtccgatctttcacctgaacaaaagaacgaagtatatcgtcgtgtccgtgacggggaggttgatcttttttatctttcccctgaattattgttggcgtatgatattagttatttcgtaggtgaacgccgcattggattggtagtagttgacgaggctcataccgtgactacttggggtaaagagttccgggtggattattggtttctagggcgtcatctggaagctttaaagaatgcgttgggatatgtattccctgtttttgcattgacagccactgctgtgtggaatcccaaaggtgggaacgatatgatttttgataccatccggtcgttgcatcttgctccgtgtgccttgtacgtgggcacggtgaagcgtgaaaatattggctttgacattaccgccatgaccatagaggagggagagacctacgataaggccaagcaacgtactgttgccgcccgggtggaggattttctggacgggcataagactattatttattatccttttgccggaggtatagatatgaaactgaagacttgggtgtatccggctaactggcattgggtggcatcttattatggtaaaaaggataaagagcaaaaagccgaaattatacaagcttttaaggagggtgagaaaaaaataatcgttgctacgaaagcttttggcatgggggtggatatcagcgatattgaccgtgtgtatcatgtggctccatccggtacctttgtcgattatattcaggagattggccgtgcagcccgtgataagaacatttctggtgtggcagcgacggactttaatgaacgcgacttttattatatgaaacgcctgcattctgcaggtgccatctcccaggaacagttggggatgattctgaagaaagtatgggaaatatatctgatgaaaggctgtagtgatgaaatgcagatctctttatccgattttgaatttgcagtgaggctgcctcgtaaaaagaacaagctggaatatgaatcggatttggagcaagtcatcaagacggctttgttatggatagaagaggatctgagtttccggcatggcggttctcctgttgaaatcaattcacagactctgtttgccgatggctatgtacaggaaaagacgggtgatgccgctttccgtaaaaaatacaagcagtatatggttcccgtggaaggggttgaaggggtctataaggtggcttttgaatctttgtgggaaaattgtttctcggagatggggtatcgtgagtttaagcgcgatttatacaatggaaatctctttgagggagttcgtgcggctgctgtggggaagcatgatgtcttgttaaaagagagtgcagcggatatctgctttaagctggcaagtctcttgaagagtttgaaagacttactgacggtgagtctgtatggtaataaaggaaagttcgaggaggacgatttgcgtagcatttttgcggcgtacgatatggatgttccttctgccaagcgttttatcacttctttactggagtccagggtagaggagggcagaagtgtgagttacatcactagtgccaagaagaaagatgaagacaaactgatgtttaccgttacccgtggttttgatttgttgctttcccgttaccagaagttgtgcacccagcgtattacagggaagaaaggaggccggctgttgttctatgtcactccgttctccgatctcaatatgctgctcaacttgctgtctatgctcaatgtggtggactttaccgtagagggaggggttccttccgttggagtgcgtgtccatgatgcggagatattgaaaaaggaagctacctcggggagctatcagaatcgtgtgctagagaataatgagaaaatattccaggaacagatagagttgttccggctgttctttggcaatacgaagttaagtgacgagcagcgatgggaatttatagaggattattttacggggatgagtttggagggattgaaagaaaaatattcttgtgttgtggaatgccggctgtgtaaggtctgaaataccgtatgattttcacggctcgataaagacagctgaggcggcagaaagctatattgtcaattgcatgtggaaaaaactcgggcaagaggaagagtggactgtatattggaaacaaaggattatgtatatatatatttgagcttaaactggatagtacggctgctgaagctttacagcagatagaggacaaaggatatgctaagccttatctgacagatacgtgcaaagttacgggaattggtatcagtttttcatcggaaaccatgacggtggaggaatgggaggaaaaacattgtaaccctgttgtgattaaataatagtgcaaaaatatgtctcaagccggaatcatcacgatccgtcttgaggcattcttcgtttatggaatttgggatacaaaccgcttacgctttaaaattgcgtgctatttttttatatccatatacggcacggttgcccaattcttcttcaatgcggagcaactggttgtatttcgccatacggtcgctacggctcagtgaaccggttttaatctgtccgctattggtagctacggcgatatccgcaatggtagcatcttccgtttcaccggaacggtggctggtcacagtggtatagccgttacgttgagccatctcaatagcatccagagtttcggtcagcgaaccgatctgatttacttttactaggatagagtttgcacaaccttcactgattcctttttccaggaacttcacattggtaacgaacaggtcatcacctaccagctggcagcgattgcccagacgctcggtcagcatgcgccatccttcccagtcgttttctgccataccatcctctatcgaatcaatggggtagtcccaactcaatttttccagataagcaacctgttcggcggcactgcgcttttccccttttgggccttcaaacttggtatagtcatagatgccgtcatgatagaattcggaagaagcacaatccaagccgatggtgatatgtttaaacggttcatatccggcagcttcgatagcggcaaggatacaattcaaagcatcttcggtgccatccaacgcaggggcaaaaccaccttcgtctcctacggctgtacttagtccgcgttttttcaatacctcttttaaagcatggaatacttctgcgcccatccgcaaggcctcacggaatgttttagcaccgacaggacgaatcataaattcttgaaaagcgataggggcatcgctgtgtgagcctccattaatgatattcatcattggaacaggcatgatataggtgtttgttccgccaatatatctgtaaagaggaatatccaaataattggctgcagcttttgccacggctagggatacgcccaaaatagcatttgcgcccagttttgatttagttggagttccatccagatcaagcatggctttgtcaataccacgttggtccatagagtccattcctttcaatgccggagcgataagagtatttatattttctacagcttttaatacgcctttgcctccgtaacgggtcttgtcgccatcacgtaattccaaagcctcatgttcaccggttgacgcacccgatgggacagaggcacggcccataatccctgattccaatataacatccacttccacagtgggattaccacgtgagtccaaaatctctcttcctttaatctctgctattttcatatagttctaattttataagatggttttattttaataacaatagagaagccggatttgttgaggtactagggaaagttttttcatgatatttacttttttatttctttccacagagtacatccgtctttatttttcgtctccctttaataaaagctagagatcaatatgaaaataaaatggatagtgggggggctgttatgggcaagttcttacttgcaggctgccgcacaagaatataaactgtggtatgatgaacccgctcaagtttggactgaagcacttccgctgggtaacgggcggttgggagcgatggtattcggcaatcccggtgtggagcatatccagttgaatgaagaaactatttgggcaggacgtcccaataataatgctaatcccaatgcgttggaatatattcccaaagtgcgccagttggtgttcgaaggaaaatatcttgaagcacaaacattggctactgagaaaataatggcgaaaaccaatagtggtatgccctatcaatcgtttggcgatctgcatatttcttttccggggcatacacgttattccgattactatagggaactgagcctggactcagctcgtaccattgtacgttataaggtggacggggtgacttatcagcgtgaaacattgacttcgtttgctgatcaggtagttatggtgcgtcttactgccagccaacccggaaagattacttgtaatgccaatcttactactccgcatcaggatgtgatggtctcgacggaaggggaggaggttaccctttcgggcgtatcttcttggcatgaggggctaaaagggaaagtcgaatttcagggacgtatgactgcacgtagtcaaggagggacccaggcttgtcgtgacggagtcttgagtatagaaggggcggatgaggctgtgatttatatttccattgctaccaactttactaattataaggatataacaggtaaccaagtggagcgtgcgaagaactatctgcgccgggctgtaagtaaggattatgtgacatcacgtaaggcacatgttgattttttcaagcaatatatggaccgtgtctctttggatttaggtatagacaaatatgcaggggtaaccactgatatgcgtgtgcagaatttcaaggaaacgaaggatgattttctggtagctacttatttccgtttcggccgctatctgttgatttgttcttcacagccgggtgggcagcctgctaatttgcaaggcatttggaatgataaattatttccttcctgggatagtaaatatacttgtaatatcaatgttgaaatgaactattggccggccgaagtgacgaatcttagcgaattgcacgagcctttgatacagctgattcgtgaagtgagtgaaacagggcgtgagtcagcaaagattatgtatggggcggatggttgggtattgcatcacaatacggatatatggcgtgttaccggagctatagacaaggctccgtcgggattatggcctacgggtggagcttggctgtgccgtcatttgtgggaacgttatctttatacaggcgatatggagtttctccgttcggcttaccctatcatgaaagaagccggtaagttttttgatgaaataatggtgaaggaaccgttacataattggttggtggtatgcccgagcaattctccggagaatactcatgcgggcagtaatggaaaagcgactacggctgccgggtgtactttggataaccaactgatattcgatttatggaatcagataatcactaccgcccgattattgggtacggatgctgaatttgccacccatttggaacagcgtttaaaggaaatggcacccatgcagataggacgttgggggcaattgcaggaatggatgacagattgggacaatccgcaggatgtgcaccgtcatgtgtcacacctttatggtttgttccccagtaatcagatttctccttaccgtactcccgaattgtttgatgcggcacgtacttcgctgatccatcgtggcgatccgtctaccggatggagtatgggatggaaggtatgtttgtgggctcgtctgttggatggtgatcatgcttataaactgataaccgatcagttgactctcgtacgtaacgagaagaaaaaaggaggaacttatcctaatttgtttgatgcccatccaccttttcagattgacggtaattttggttgtacagcgggtatcgtagaaatgctgatgcagagccacgatggttttatttatttacttcccgcattgccggcgcaatggaaagaaggaagcgtgaacgggattatagctcgtggaggttttgaattggatttgagttggaagaatggtaaagtgagccggttggtggtgaaatcccgtaatggggggaactgtcgtttgcgttctttaaatccgctggcaggcaaagggctgagaacggcaaaaggggagaatccgaataaattgtatgccatacccgaaatcttgcaaccgattataaataaagaagcgaaattgaataaagttgagttgaaaaaaacttatctttatgatctggaaaccaaagcaggtgaagaatatatattcttaggtaagtgatgattcttgcactgattgtaaggatgaaaaatagtaaaaagaagaaatatgaaaagaacaggattaaacattatttactcattgttgctggtaggtggaatgtgtgcatgtactgccactcctaaacagaccgaagaaatcaaatggagcgaacgtatggctcagtcggaaatgcaacgtttccctgagccttggatgatagaaaaagcgaaaaagcctcgttggggctatacgcacggactggtggtgaaatccatgttggaggaatggaaacacaccggtgacacagcctattataattatgcaaaaatatatgcagacagtctgatagacactgacggtaagataaagaccatgaaatatctttcttttaatattgataatatcaatgccggaaagattttattcgatttttatgaaaagacgggagacgggcgttataaggtggcgatggatactcttcgtaaacaactgaccgaacagccccgtaccagtgaaggtggcttctggcacaaactgatatatccgcatcaaatgtggctggatggtatattcatggcttctccttatttggctcaatatggtaacgtattcaaggatactacggtcaatgccgatattgtgaatcaaataaagctgattgcccgtaaaacgtatgatcctaaaaccggtttgttttatcatggttgggatgagagcaagacacaaaattgggcaaataaggaaaccggatgctcacccaatttctggagccgcagtataggctggtatgccgctgccgtggtggatgtattggattatatgccggcgcagttcgaaggacgtgacagtataatgacgatcataaatatgttggccgaaggtattgtaaaatatcaagatcctgaaacaggggtatggtggcaggtgactgaccaaaataaccgtaaaggaaactatttggaatcttctgcttcatcgctttttgtgtatttcttgtgtaaagcagtgaataaaggatatatttcttcggaatataagatggctgcagaacgtggttttaatggcctgatcaaacaattcattaaagaagaacctgatggttcgtacactattaccaactgttgtgctgttgccggattaggcggtaaaggaaaccgggatggaagttttgcttattatataggtgagccggtaatagagaatgatccgaagtcagtaggttcctttattttggcggctattgaatatgagaaaatgaagtagtaggaataatctgagaaagatgaggacatttgtcaaaaaagtcttcatcttttctcataagatcaagagctttttaaaaaagataaccgccttttttaaaaaacataaggacctttttttaacaccttgttgttttgataaaagctcttgtttagagattgttaattaattaataaacgaatttgaaaatacaatgatgaacagacacgcattactttccttattggctttattgctatgttactctacttccttgccggcgcagaaagcgaaaacgtatattccctggaagaatggcaaactggtggtgtccgaggagggacgctacctgaagcatgaaaatggagtacctttcttctggttgggtgaaactggatggctgatgccgcaacgcttgaatcgtgacgaggtttcttactatctgaataagtgcaaggatgccggatataacatggtgcaggtgcaggtattgaacggtgtgccttccatgaatatttacggtcagtattccatgatagacggttttaatttcaaggatatcaaccgcaaagggatttatggatattgggaccacatggactatattattaaaagtgctgcttcacggggcatctatatagggatggtatgtatttggggaactcccgtggaacaagggttgatgaatgaaaaagaagccgtggcatacggtaaatttcttgcggaacgttacaaggatgagccgaatattatttggatgataggaggggatatccgtggtgataataagacggaggtatgggatgcgttggcaaacagtatccgtagcatagacaaaggtcatctgatgactttccatccgcgtggacgtaccacgtcggctacttggtttaatgaccgcgaatggctggatttcaatatgttccaaagcggacaccgtcgttacgggcagcgtaatggtgatggtgactatcctatcgaagagaatacggaagaagataactggcgttttgtggaagccagtcaggcaaagactccgttgaaaccggtaattgatgatgaacctatttatgaagacattccacagggactgcatgatcccaatgaaacccgttggaatcagcacgatgtgcgtcgttatgcctattggtcggtattcgccggatcattcgggcactcatacggtcataatgatatcatgcaatttatccgtcccggatatggagcctctttcggtgccgacggacgtaagaaagcatggtgggatgctttggaagaccccggtttcaatcagatgaaatatctgaagaacttgatgctgacttttcctttctttgaacgtgtgcccgatcagagtgtgattgcaggaactaacggcgaacgctatgaccgtgccatcgctacccgtggaaatgactatttgctggtttacaattactcaggacgtcctatgcagatcgatttgagcaaaatcagcggtgcgaaaaagaatgcatggtggtatagcgcgaaggacggtaagttggaatatatcggtgagtttgacagtaaagtcactcctttccagcatgatagcggttatctgagcggcaatgatcaggttctgattgttgtggattctgcgaaggattatgtgcagaaagcttggacagccttgccggatgccatacagaaatggaataagtaagaaatatgcatatcatgaaaaaacaagtattattaatcattcttttggcacttccgttgtggttgaaagcagcggatgtttcggttaccggcctgcgtaccgagcagatggtagatcccatggggctggatactgctgtccctcgtatgagctggcggctggaatcttctcaaagaaatgtgatgcagaccgcctaccggattttggttgcctcttctcctgaacttttagcacaggataaaggggatttgtgggattccggaaaagtggaatccgatgcgtccgtatggattccttatcaagggaagcgtttgaaaagcaatcagcgtgtttactggaaagtgagaagctataccaatcgaggtgagacagaatggagcgagcctgcccgatgggggatgggacctttaggtgagattcattggggaggacgatggataggttgggacgctgcgtttgcatgggatcgggaagattcacacagccgtttgagctctcgttatttacgcacggaatttaaaacgcaagccaaggagataaagtatgctacccttcatttgtgtggtttgggaatgtacgaactgttcattaacggtcagcggataggtgatcaggtattggcgccggctccaagtgattatcgtcgtactgtgctttacaattcttttgatgtcactaaacaggttgccggaggaaatgccgacaatgccatcggagtgaccctgggcaacggacgtttctacactatgcgtcaaaattacaaaccttataagattcctacttttggttaccccaagttacgtttgaatctgattatagaatataccgacggcagtatacagcgcatcaacagtgatgagaaatggcgtttgacggctcaagggcctatacgtagcaataatgaatacgatggtgaaatttacgatgcccgtatggaattgggaaactggacacagcccggttatgatgattccaaatggctgaaagcgcaacgtgtttcattgccgtacggtacacttcgtggcaataccgctcccaacatgaaagtgatgaaaacgctgaagccggctgtcttcaagcaatatggtaaccgttatatgattgatttcggtcagaatatggcaggatgggtgcgtattaacatagcgaaagccgctgcgggagatacgatttgcatacgttatgccgaacgggtaaagaatgacggtacggaactggatgtggaaaatctccgccatagccagagtacggattattatatctgcaacggtaaagaaaacaacacttcctggagttctcgtttttcttatcatggattccaatatgtagaagtgacaggttataaaaatctgaaagcggaagatttggttgctgaagtagtatatgatgacttggaagataacggtactttcgaatgttccaatgatatcatgaatcgggtttatcggaatgcctggtgggggatttccagtaattataaaggagtgcctttggattgtccccagcgtgacgagcgccagccctggctgggcgaccatgctatgggaacgtggggggaaagtttcatgttcaataatggaaacacctatgccaaatgggcggatgacatccgtgaagcgcagcgtgaagacggttgtattcctgatatttgtccggcttattacaattattatacatcggaaatgacgtggtcatccacatttccggtaatctgtgatatggtttatgaacagttcggcaatatcgaacctattcgtaaaaattatgccgctatcaagaaatggatgcaccatatacgcagtgagttcactacagaggatggagtgattaacgccgataaatacggtgactggtgtatgcctcccgaatcaccggaattgattcacagtcaggaccctgcccgcaagacggatggagcgctgattgctacagcctactattataaggtatcgcaaatgctggccaagttcgcccgtttgcaaggtttggaagatgaggcgaaggaattcgagaaggatgcagcaaaaattaaagactgcttcaatgcccgtttccttacagttaagaagggaacttctccggtacaaatgccccatgttctttatcccgacagcatattctatggtaacaatacagtgacggctaatatcctgccactggctttcgatatggtgcctgaagcctatagggaagaagtggaaaaaaatgtaataacaggcattattacccggaataaaggtcacatcagcagtggggtgataggtatgaattggatgatgcgtgagcttacccgtatggggcgtggcgatgttgctttcttgttggcaagcaacaaaacttatcccagttatggctatatgatagaaaagggagctactgccatttgggaattgtggaacggtgataccgccaatcgttggatgaacagttgtaaccatgtgatgatattgggtgatctattgacttggtatttccgtgatttagccggatttaatccggcacagcccgcttacaaacaaatcatctttaaaccggatttttccatccaagagttgagttatgtcaaagcttcgcataacactttatatggtaagatgattagtaattggaagaaaactcttacgcatctggaatgggatatcacgattccttgtaatactactgcattggtttatcttcctaccttggacgagaaggcggtaaaggataaggacgttacctttgtacgtcgggaaggcaactctaccgtatggagtgttccttcgggaaactatcatttttcggttagtatggatccatctttaggtaaaaaccgtgcaggtatcgtggaagatcagtttttatacgagcaagcttcttttcccgaatgtcatggcgctactattgtggaattgaagaacggagacctggtagcttctttctttggaggtactaaagagcgtaatccggattgttgtatctgggtatgtcgcaagccgaagggtgcgacggaatggagcgcaccttatctggctgccgacggggtgtttagtctggatgatccgcaggctgttttggcgggcattacagcagaatccactccggcggatgccggccccgtggcttctacgtttaaaggggataagtcccgggcacgccgcaaggcttgttggaatcctgtgcttttccaaatacccggcggagatttaatcctgttctataaaataggattgaaagtagccgattggagtggttggctggtacgttctaaagatggtggaaaaacttggagccaacgtgaaccgttgccaaaaggtttcttaggtcctattaaaaataagccggagtatgtggatggccgtattatttgtccttccagtacagaaggtgatggaggatggcgtatccattttgaaatttcggatgataaaggaaagacttggaagatggtaggtcctgtagaggcggaaatgagtgtgcctactgctttgcgtaaggcaaatgcagccaatgtagacgatcaggaaggcggtgaagccataaaaggagaaggcgagaagcctatttatgctatccagcccagcattttgcgtcataaggatgggcgtttgcaggtgctttgccgtacacgtaacgcacagattgctacttcatggagcagtgacaacggtgaaacatggagtaaagttaccttgcttgatgttcccaataataattcgggtacggatgccgtaacaatgaaagatggtcgtcacgtattgatttataatgatttcagtacattgccgggcactccgaaagggccgcgtacaccgttgtgtgtggcggtttcggatgatggtattcactggaagaatgtaatgacattggaagacagccctatcagccaatattcttatccgtccatcattcagggcaaggatggcaaactccatgccgtatatacctggcgccgtcagcgtgtggcttataaagagttggatttgagcaaactgaaataatacgattgtggataaaggagttctttgatagaaagtattggagaacttgaaaaaaacgggtgtctgaaataaaaatcagaaacccgttttttgaaaacagactttcattatctgccaatgaaagctctttctaaagatacagaatatgaaataattataaatagagtacaaacgtttcttattatcgtcctctctttataaagaaaagaataagtgacagattattatgaagagcattagactactacttttactggcttccggagtaactacgggagcatttgcccaatcgggcgggctgacggatatgagccaaagtcgttttgccaagatggccaatacggaattaggtgctgtgcattggacagatggcttttggggcgaccgtttcaatgtatatagccatacctccttgcaaaatatgtgggatacatggaacaatcccgatgtttcgcatggtttccgtaactttgaaatagctgccggtgtttgcgaaggcgaacattggggacctccctttcatgatggtgatatgtataaatggatggagggagtggcttccgtgtatgccgtcacgaaagatcccgaattggataaactgatggaccacttcattgaacatgtggtgaaagcccagcgtgcggacggttacatccatacccctgtcatcattgaggaaaagaataaggggattgacactcattcggaaaaacagcaacagacggtaattggtaccaaagtaggcggtgaggacgagaaaggtgcatttgccaatcgtctgaattttgaaacctacaatttgggacatctgatgatggcaggtattattcatcgccgtgccaccggaaagactactttattcgatgctgccgtaaaagcgacggacttcctctgtcatttttatgaaaccgcttctgcggaactggcaagaaatgctatttgtccctcccattatatgggcgtggtggaaatgtaccgtgctacagggaatccccgttatctggaactttccaagaatctgattgatatccgtggaatggtggaaaatggcaccgatgataatcaggaccgtattccgttccgtcagcaatacaatgcgatgggacatgccgtgcgttccaattacctgtatgccggtgtgaccgatgtgtatgccgaaacaggagaagaccaactgatgaaaaacctgaccagcatctggaaagacattgtgacccgcaagatgtatgttacaggagcgtgcggtgcgctgtatgacggtacttcgccggatggtacctgctatgagccggacagtattcagaaagtacaccaaagctatggccgtccttatcagttgcctaatagtacggcgcataacgagacctgcgccaatatcggcaatatgcttttcaactggcgtatgctggaagtgacgggcgatgccaaatatgcggatattgtggaaactgccctctataacagtgtgttgagtggtgtcagtctggatggaaagaaatatttctataccaacccgttgcgcatcagtgcggatttgccatacacacttcgctggcctaaagaacgtaccgagtatatcagctgcttctgttgtccgcctaatacgctgcgcaccgtttgtcaagcccagaactatgcttatacggtgactccgaatgcggtatattgcaatttgtatggagcgaatacactggctacaactttgaaggaaacgggaaagatcgggctgatgcaagaaacggagtatccgtgggaaggtgctgtgaagctgactgttaccgaagctccgaaaccatcaaaaaagaaagcattctctttgttcctccgtgttccggactggtgcgagaaagcaactttgaaggtaaatggtgaaccggtgcaaggaacttggaaagcgaatacatacgccgaggtaaaccgcatctggaagaaaggggactgtgtggaatgggtgatggatatgcctgtaaaattgctggaagcaaatccgttggccgaagaaatccgtaaccaggtagtggtaaaacgtggcccgttggtatattgtttggaaagtatggatatagaaggcggacataagatagataatgtgctgatacctgccgatatccggttgaccccgaaaaaaataatcattgaaggcagtccgattgtcgcgttggatggtactgcccgtctggttgatgaggtatcgtggaaagatacattgtaccgcgaggtaggaaaggccgacaaaccggtcaatatccgtctgattccttattatgcatggggaaatcgcggaaaggctgaaatgacggtatggatgcctttggcgcggactaatcactaaccacttactcctaatgatttacaaatgaaaaaaatattcataaccactactgcgctgctgatagcttgtacactatcagcagccgatttgttcgtatctccgaaaggtaatgaccggaatccgggtaccaaagactctccgaaggccacccttacagccgcattgcgtcaggcaagggaacttcgtcgtcttaatgatgagagtctaaaaggtggcatcaccattcatatggaggcaggtgattaccatctgtacgaacccgtctttattcgtcccgaggacagcgggacggaagcttcacctacagtcatcacttcggatggaaatgccattctgaatggtggggtggaaatcagaaactggaagaagcaaggaaagttgtgggtagccgatgtccctatgtttaacggacgtccgctggatttccggcaactgtggatcaatggacaaaaggctgttcgtgcaagggatgtggcagactttgaaaagatgtatcgcatcatcaacaacgatccccaaaacgaaatactgtgggtacctgccgctgctgtaaagaaaatacagaaggcccgatatgccgaaatggtccttcatgaaatgtggtgtgtggcaaatctccgtatcaagtcggtcgaaatacagggagacagtgccgccgtgcgtttccataatcctgaaagccgcatccagtttgaacatccgtggccgcgtcctatggtgactaaggatggtcacaactcggctttctatctgaccaatgccatggaattgctggatgaacccggcgagtggtatcatgacattgaaagccgtaaaatatattattatcctcggaaaggagagaagataagcaaagccgtagttcccggcatcgaaacgttggtatgggtggaaggaactatagaccgtccggtaaagcacattcgttttgacaatgttactttccaatataccacctggatgcgtccctctttgcaaggtcatgttcctcttcaggcaggtatgtacatgacagacgggtataaaatccgtccttctatgattcgtaagaacaatcataagctggataatcaaggttggttgggacgtccggcatcggcagtcgtagtcaaggctgcccaggatattgatttcgagaagtgccgtttccagcatttgggctctacaggtattgattatgaatgggccaccggtggaggacgtataaacggttgtcttttccgtgatattgccggaaacggtattgtggcgggtagtttcagtcctgccgctcacgaaacacatcttccatacgatcctgccgaccgtcgtgaggtctgtaccggactgaccatttccaacaattatatcaatgatgtgaccaatgaagactggggtaccttgggcatttgcgccggttatgtaagtgatatcaatatcgaacacaatgaaatcagtgatgtatcctattcgggcatcagtttgggatggggatggacacgtacagtaaactgtatgcgcaataaccgcgtgcacgccaatctgattcatcactatgccaagcacatgtatgatgtagccggtatttatacattaggttcacaacctcatagctggattacggaaaattgcgtttctaacattttttcacccggttatgcacacgatcccaatcattggttctatctttacaccgacgaaggatcttcatttatcaccgtcaaggacaactggacggaaggagagaagtttctgaagaacgccaatggtccgggtaatacatgggaaaacaatggtccgatggtgaacgacagtatcaaggcaaatgccggactgacaaaggaatatagctatttgaaggaaaaataaaacgtgataccattatgaaaaacagacttgccactttagtcggagcacttgcattgagtgctgccgcctccgcccagacctggatctggtatccgggtgattatgaaatatggctgggcaaccagatgaacaaccgccgtacggaacgcggtgcttttttccctcccttctggaaaacagacagccattatgtggtagtggaattcagcaagaaattggacctggcggaacctgaagagatcttcattgccgccgaaggaaaatacaatgtgaaattggatggcaaactgcaattcggtatgccctccaccttgaaactccccgcaggaaaacacagtctgaacatcaaagtgtggaatcagtccactccccccactatttatgtgaaaggaaaaaccgtaaatacggacaaaacttggaaagtaacctacgaggataaagaatggatagacgaaagcggaaaagccagtgatacttctgctaccgtttatatggatgcagggtgttggaactttgacggagccacccaactgccttccaagttttcattggttagaaaaccgatgaaagcagtttcctccactccccggaaagagggggtattgtacgacttcggaaaagaaacctttggttatatcactctgaaagatgtaaagggaaaaggaacgatccatatctattacggtgaaagtcctgaagaagccttggatacggaatattgcgaaacattggacaaattgctggcagagccggggcaaataaccgatctggccatccggaatacacggaaactatacgatgaatatactttagacaatagcaaggctttccgttatgtctatgtcacttgcgatccgggagtaacgatgcaggacgtttccatgcaatacgaatacctgcccgaagagtaccggggctcattcaaatgtaatgacgaagagctgaaccgcatttgggaagtaggagcgtacaccatgcaccttactacccgtgaattctttatcgacggcatcaagcgcgaccgttgggtatggagtggcgatgccatccagagttatctgatgaactactatctgttcttcgataatgaaaccgtgaaacgtaccatttggctgcttcgtggaaaagaccctgtgaccagccacagcaataccattatggactacaccttctattggtttctcagtatttacgattattatatgtattctggtgacaaagactttgtaacccaactctatccgcgtatgcaaagcatgatggactatgtattgggacgtaccaacgccaacggtatggtggaaggtatgaccggtgactgggtattcgtagactgggcagacggttatctggacaagaagggcgaactctcctttgagcaagtcttgttctgcaaaagtttggaaaccatggcgctttgtgccagtctggccggcaatacggcagacaaaaccaagtatgagaaactggcttccgctttacgttccaagctggaacccgctttctggaatgagcagaaacaagcgatggtacacaaccgtattcagggaaagcagagtgagtccgttacccgttacgccaatatgttctctgtcttcttcaattatctgaatgccgataaacagcaggccatcaaacactccgtattgcagaatgacagtattttgaaaatcaccactccttatatgcgtttctatgaactggaagcgctgtgcgccttgggcgaacaagaatcggtaatgaaagaaatgaaagcctattggggcggtatgttgaaagaaggagctaccagtttttgggagaaatacaatcccgaagaaacaggtacccagcatttggccatgtatggacgtccatacggcaagagcctctgccatgcatggggagccagccccatctatttgttgggcaaatactatctgggagtaaaacccaccaaacccggttacgaggaatactccgtcaccccttgtctgggcgggttgaaatggatggaaggaacagtacctactccatacggcaatatccatatctatatggataagaaagtaatccgtatcaagtccgacggcggaaagggaatactgaacattccaacccggaaaggaatgaaagccatgaccatagaacccggaaaagaacaagtattcaaatactaatggtatagatcaaaaaaaggtgatacctaccttcccaggcgggtatcaccaacactacttcgtaagtttccgttatccgctgataacagtacttacctctgatctaacattagttttcttatgggcttccccctgtatcactacattcggaagcggggattctacatcttggaaaaaagtatcttccaaaagcttcgctttttattctcttctttattatctgaactttgataaatatcttcgtatccccatttgtcatggatcattctgtaaatcatcccccattcgggcagtcctcccagattgcggtcatcaataaacaaatccgccttcagttttctggaataatgatcactttccagggtttcttccgcataattgctgtttacggcataaaattccaatccacgctcccggcagaaatccacggcctcctgtaataatttaccttcccgtacactccacagaataaggcggtgtcgttcctgttgtagttttttcagcgtttctatggcaaagggtagttccctgcctatttcgggatatttatgctccactattgtgccgtcaaaatcaactgctataatcattccttatgctttcgaaaattctttaatacgctgctcctctgccagtttgcatatcagcagggttccctctttctcggctatgatatatccgtccagtccttgtatcaccgcttgtttcaaatgcggtgtgtgtacaatgcagttattacattcatacaatcggatattttcgcctacgatggcattgttccggttatctttgggcagcaaggaatgtaatgagccccaactgcccagatcagaccatccgaactctgccggcaatacataaatccgttccgctttttccattacggcataatctatggatatactttcacaagtagggaacagctcttctatggtttctttttccctttcggtatagaactccggataaatcctgtcgaacacctcggcgatgcccggtgcataacggcgtatagcctcttctatggtttttacattccatacaaaaatccctgcattccagaaataattcccggcgtccacatattgctgtgccgttttcaaatccggtttctctttgaattcatccactttccttatatcctgatccacctcttctcctgcggctatatatccgtatcccgtttccggacggcaaggtttgatacctatggttacaatgcccttgctttgatctgtcatcagcagtgccttggctatcgcccggcggaattcatccgtattgataaccaatgcatccgcaggagtcactacaatattggcgtcagggtggtgttttttgattttccagcaagcgtatgtgatgcagggtgccgtgttacgtgcaaccggctccgtcagtatatgatgaggcggcacagatggcaattgtttccttactgtctccttatacttttccgaagtcactatccatatattatccggaatgcacaacccttgaaagcgttccactgtcagttggatcaggcttttgccacatcccgtcacatcaatgaactgtttgggacattccggcgtactcatgggccagaagcggcttcctatgccgcctgccatgataacgatatgagtttccataacgcgtatgttctttatttctttttatattccagataccattggtacatcttgtgcaccccttcctctatgtctattttgtgatgccatcccaattcgtgcaatttggtcacatcagtcagtttgcgcatggtgccgtccggtttctccggattgaatgtaatgttgcctttatatcccgtctcctttactatcagatgagccaggccggcgatggagatttcttttcccgtaccgatgttgatgtggcagttgcgtatctcttttgtgccgggacggtaagtatctttaaagtccacatgctccatgatgaatacactggcatccgccatttcctcactccataagaattcgcgcagtggcgtgcctgttccccacagttccaccccgtccttgctgataccgtagcttttcaggatagccagtatctcctctgttctgctctctccgtttataccttccaccggacgcatgtccagatcatagcgtatgttctcccagttatcttcgttcaagcatttggcaagatgtattttccggatcatggcaggcagcacatggctgcgttccagattgaaattatcattgggaccgtacaggttcgtaggcataacagcgatatagttagtaccatattgcaagttgaaactctcgcacattttcagacccgctattttggcgatggcgtatggctcattcgtatattccagcggggaggtgaggagagcatcctccttcataggctgttgtgcgtctctgggataaatgcaggtacttcccagaaacaataatttcttcacgccgtgacggaagctttctcctatcacgttctgttgtatttgcaggttcttatagataaagtccgccctgtatgtactgtttgccatgatacctcccacgtgggcggcggcaaggattacatagtccggtctttcttggtcaaagaagtcctttacggcaaccccgtccagtaagtccagttccttgtgacttttgccggtcaggttggtgtagcctttttcttgcaggttacgccaaatagcggagcccacgagtccgtggtgccctgctatataaattttggctgatttctccattgaaattttaactaatgatttaacagcttgctttaagatggagtttcttcacgaatttcatatcgtgtttcaccatgattcccaccagttcctcaaatgaagtcttgcggggattccatcccagtaacgttttggctttggtaggatctcccagtaattgttccacctctgccgggcggaaatatttgggatccacctctaccagcaccttgcctgtagctgtgtcaatacccttctcgttcacaccttcaccttcccagtgcaagtcgatgcccacttccttgaaagcaagggtggcaaattcgcgtacagtgtgatattctccggtggcgataacaaagtcttcgggcgtatcgtgttgcagaatcagccacatacattccacatagtctttggcgtatccccagtcgcgcagggaattcagattccccaagtacagtttatcttggaatccttgtgcgatgcgtgctgccgccagggtaattttccgggtaacaaaagtttcgccccggcgttcactttcgtgattgaacaaaatgccgtttacggcaaacataccatagctttcgcggtaattcttggttatccagaaaccatattgcttggctactccgtatggagaacggggatagaaaggagttgtctctttctgaggaacttcctgtaccagtccgaaaagttccgaagtagatgcctgataaatcttggttttcttttccagtcccaatatacgtaccgcctccagcatacgcagcgtacctaccgcatccgcttccgctgtgtattcgggcacatcgaagcttacttttacatggctttgtgcggccagattataaatctcgtcaggttgtacagactgtatgatgcgtatcagtgagctgctgtccgtcatatccccccaatgcaggttcaccagtcggttctgcttcatatcccgcacccattcgtccagatacagatgttctatacgtgcggtgttgaatgaagaagaacgtctcagaataccatgtacttcgtatcctttttctatcaggaactcggccaggaacgaaccgtcctgacctgtgatacctgaaatcaatgctacttttttactcatattttgtattaattgaaaagactgttttagcctatagagccaccaccatgcatacttgaactttggttggtataaacaaattccactcccagataatgtttaacttttacagtaacctttttaccggcaatagagaaagtgtactctttttctacatatttggctttgcaagagaaatacagaatatagtcaccgcttacgtgggctgtaaaggtcttgtttacggtgtatacaccttccgatccaccttcttgtgcggctatggcagctttcaccaatgaaagagcgccttcatccagtccggatgcagagatttcccatcctaatttggcagtataaggaatatcataagtagtagcgctcatatttcctgcgttactgtagctgtcttctttcaatatttcatcgttcttggtttcgctgacattcttttcactctttacacggatagaataatccttattcagtgaacttccctttttgatggcagctatgtagctgttggtcgctttatcaaaagcggcgtcggcatatttcttccagtcaccgatagcacgtgcgttagtcttttcgtatacctctacttcgtcaaaataataatcgctggaactagcattggctacagacaaggtaacatcctgatttaaggctgcatcctggctggaactgatagcaatattagtcatgggaatcgcttcttccttactgcccggagtcacatcggttgcaacagcttccagatacggagtaagagttacatcggtagcggttgatacggcaccggcgggaatagtcaatactgtctgggcatcttctgtttccccttctcctttttctgtaatcactttatcactttcaggatcaacagctacagccacgccttccttgctcatagtcacgttcagtgttactagacttctgttggtagcgttgttagctatttctactgatgcgtcagaaacagttctatatccctccttggcaaagctcaccgtataagttttcttatcttttaccgtcagtgaatattgaccgttttcgtctgtggttgcggtagcctctcccgctgttacgctgactccgtccagtgcggcattatccgctactactttaccttcaatgtaatattccacattttcgcttacagggtcaactacaatttccggttctttgtcgtcatccccgcagcttattaaccccaaacttgctacaaacagcagcaaacctgttttaaaaaacttgcttgttctcatttttcttcgtttttaaaaattagtaatctatttatttgcttcctttatcaggaaatagcgtatatattccggttggaaaaaccggttactccggttctcatcaggtcgggtgcgataagtttcccccattttttcatccgcatatctgccccaggattccatactgtattccatggcaaaataatccgcttgcctgacacgcaccccccggttacggctccacttcttgccgggcagagggatggcaaaatggaatcctccgtttatttccccatcggtatacattccatacacgccgatggcatattctccgaaatggcgggtgcagtcgcctcttactccataatccccatatagataacgtgcagcttgcaaatcaaattgcaaattgaagcgaggttcatacacagatgctttcagtgcggcattcatccgcagtttccggctgatataccatccttcgtcgtcggtcagcacagattgcacggtagctcctgccacagctcccagttccagtctgccatttgctgtgcggtatttcatctccgcttgtgcccccatgcggttgttggtaaagtttcctgcggttactcgccccaaaaatcctttgccgaagcaaaactcttgcgatagtgcaatcactccgggacgtatcttcttatactgtccttttaggttggtcgctaccgggaataccacttgcgctgtcagttccgcccctttccataaagccatttctacggctggagccaggttgacatagtaagtataaagtcggtcaaagctggagttttccagttttacttccggatagaccacaatgtctactttccctgccgatgaattgagtgtccggtgtgtctttttcagtacctccatcgcttcatcggtatcataactgattcccatctgtcggtacacttcccctatggtaatctgtttctctttatattcggttatcaccttatcgctcagcgtaatgcatagctgggggatactgtgctccaacaccaccatttgcagatttcccccgtacattccttccatggctgcttcgatggctttgcctattccccggtaagtacctctatatacattgtcttcaaaagcaatcgttgtgttgccgttcacctccgttaccgtttgtatgttctccattcccagttgctgtagtttctcggccacttgtgcccggagggagatgctccatgccgaaaggaggattgctattaaatatttgctcattgcgtcaatgtattagggtacactcatagcgtataccacccgatacgcaagtaaaatcgtgggtaaaagcatgcatggacaaatgtttccacagcctgacagctgctcccacattcaccccgtccgagtcatattcggccatcatcttcaactctttgcagaaagcgggtatatagcttatccctccaaatacacctttgtatttattgccgaaccatttggtattactgttcttcccgccttccagataatatcccaaagaagctgagagataatgctctcctcccagatggaatcctttcgttatcactccatagtaagattgaaaagtgttggctcctttatccgctatcggatcattggctcccagtgctattcccggcagaaactttccttctttccacacacacagccggatggagtaggaacgatcctgctgattgtatttaggcttggatgatatatagtccccttttattaaagtttcccgataggcaagttccagaaaggaaaagaaactgatgctcacaaagtaatttcctgtgttgtagtcgaatcgtgcaggcatcatctgtttgggcagataatttcctcccaacatcacagttcccggcttctgcctgtcggcggtaggaatattcatcataccggtagttcccagcatatattgtgcttgtatatgctgatgaactccgataatcagcaaggttagaactagtaaacgtattttcattcttttttatttgcggcggcaggttgtatcaggctttcttcctctgcttccggtatttcactccacggcagtctggcttcaatgaactgtggaatctttgaaagaattttgcctttcagcgccgagatgggttttattccgtgacttttatacattctcaagtcctccgcccatttcagtttgctttttcctgcatcagtagaaagtccccccattctcattttcacgatgtatttgttcaggtaatatactttcaggttggcttcatacagatagcgcaccagcaaatccgagtcggcggctatcttataactttcgtcgtaaagtccccatttatccatgcactccttctttatatagacagtggggtggagtgggagccatccgttttttacattctctttactgtaccgtccgcttatccagtttcgtatcatctggttggtgtcgtcataatctacaaagactccgttgccgtatatcatatccgcatcttgttcctcgaatgttttcactatgtcggagatggtgtgagatgagaacaggaaatcgtcggagtgaatcagaccgataatatctcctgttgctgcacgtattcctttgttaatcgcttcatacatacctttatccggttcggaaataattgtatctatcccgtttttatattcattgatgacagccagcgagttatctttcgaagctccgtccaccacaatgtattctatgtagggataatcttgttccagtacactttctattgctccacggatggtggcttcccggttatagcaggaagtaatgattgaaactttcataatgttcggtattttatcttgtaatatttcttgttcgaattttttgtgcaggattcccttgataaattccgtatgcttccatcgttctggtagcagtggatccaactgttagtatagcatgtgattttacttttactccagggcatatcactgtttttgcaccaatccatgcaccatcttctattataataggggcattccggtaattgaaagtggacagtgtatagtcatgatttcctgtgagtaataatgctccttgtgaaatgcatacattatttcctattatgacttcatcaagattgtcaatccatgcattttctcctagccatacatggtttcctaatgttagtttccaagggaattttatgttcacattatttttaatcactaatccttttcctatttttgcaccgaaaagttttaagaagaacatttttattcccataaaaggattccaggaagcacgtacaaataatgcgttgacaaaataccaaagagtttgttttataaatcctgctcctttattaaaattccctgtgttgaaagaagataaatgaacttctgtcattgctctaatattttttgaaatacattatccatgttgtttatatattgctgttctgtatagtatgaatgagctatattataatttctttcgcatatgtttattaataaagaacgttctttatctaaacgcaatatataatcatatatctcttctaaattgatgttatttttatctataactagtccatgttctttgtttgttactatgtcggggatacctgcatggttggtggtgataatggtcatagcatttcccatcgcttctaatatggagataggttgtccttcatttggatagcgggtaagcagtatgaatatattacataagtttaataagtcatttttctttttacctgaaacgattccatgataggtgatggtattttttagttggtgtttagttataaaattttcgaaatacatcctttctttttcttcgaaaaattttcctgcgaaatgaaaatgtagagtactcttttgctctgtttgtacttttgctgctaattccaatacttctttatatccttttgattctataaagttgcttagataaaggatatgtagtacaggttgtgaagccaataagtttatttttgttttgtagctacaggcattcagcatatattcttcatcaacgcagttgggtacaacgaatattttctgttcatttatcattcctttgaaaatgctttttaaagagttacctaatacaatagtaccagatatacgacttatagctttatagtttaggcttctttgtaattttccacagtctttttctatcaaagtgcgataatatcctccatgcaaatgaatcaaacattttctttttttccattgtaataattttagtattagtagatctcgccagttccctccacgcgtttgtgctatggtaaaatagtataagtcacttgtattggttgtaatcttccataatgtttttaagatctctttattattagttagatttatttgttgaaagagatattttgactggagtgcagaagtataaagagtttctacagcttttgataatccgtggatagggggcggaaattgagctatgaagcagattcttttcatccgtcgattaatttttagtttattattttaagatgtttttctaccattttttcaatggtataactggctattttatgcaagttttgttgtgctatttcaactcgtaattcagaatcattcattagtttttccataatgttttttaattgttcagaattatctgtgtcaattaaacattctttatttgttattagttccatcccagctacacacttattagtagttactacaggtagtccatatgccatagattcatttataactaatccccaaatgtcttctcttgtaggatgtacaaatatatcagctgctttaaaatacatagctaattcttcttttgtcttaaatccttcaaaatgaatttgagtcagattattttctttttgtatttgtaaatactcttctgtgggtttcccacctacaatatagatgcctatatttttgtccatagtacgtgctgcttgtaataagacatcaaatcctttcctatggataaattgaccgactgccaaaatcatttgaggttcttttatatctaatattttgcgaatggcatttttctcttgttgggataatggggtgtttatgatatctttgtttcctagcgaactgaaaggatatctatagattgttgagttttctcctgcataaaagcgaatatattcatctgttatttgactaggactaatatacgctttcgctccttttagaaaaaaacttttaaatatttttttggctttcccttcatgatatttagccatagcaccatctacttcataataatagggaatgttgcgcaatttaatagataatagagcagccatttctgtaaaatacgcataatttgtgatgaaaatcgcatcatattttaattgttttatgtatttaaatatactccagtctatttttgtttcttggatttctccttcttttaaaaaaatggctttgaaactactgatagtattttctttccagttaaaagtgatccctggagcgcgtttggcttcaaataccacagttaattcacagtgttttcccaattcattataaaaatcaatacgataaggagcgggaatatttgtgatgaaaagtactttctttaatttttgttccataagtctatatagatttcttgaagtttttgagcttctgttttaatatcataaccagatgcttgtatgtcaaaatgaaaatccgttctaggtgtcttgtgtgtttctatatattcaattatttttttataccataattctttttttaagtctatgaaatctatgttggtggatatttgtgcttcacgtgtaatttctgatgacaggaatgtggggcagccgttagcttgattttcaatagctacaactggtaatccttcaaataaagatggtagtacaaataaatcaaaagcgttatagaaaagatttacatcatccctaactcccgttaatataacatgttcttctaaatttaaagtgcttattttttgttggattgcttcttttaaatgcccttctccaataagtataagtttacttttaggtattgtcttatatatttctgcaaaaacatctaaaaggaacatatgatttttttgcgtatcaaatcgtccaacatgtcctattagaaaattattttttatattgtatttttgccttatttgtctacgtgcttcgggattaaatttgaacatttcagcttctattgcatttctgatgatctgaaaaggttggtctttaaataaccatttgcctgccatctcggagcaagccattcggtgagtagcatactgattgattttttctctagcttgttctagaaaaaatagttttatagggttattggttaaatgtttagtattatgactatgggcgattcgtacaggaataccgcaattttgagctacctttagtacccacgctcccatggcatccatatgtgtatgaataattttatagtttcctttttttagtattgtttttaacagagttgtataacttaaaggatttttgcttttttgtggaagggtaaaaatttgtcctcctaaatttttaatttcttcatcataatacccataacctccagcattatgtactataaaatctatttggattattttatggtcaaagtgacggtaatagttcatcatgtatgattctataccgcctcggttcataagaccgccgtttatatataatattttaataggaaattgcataggatataaatataatattggatatgatttatttacagataatgagtttatataatttgttgataacttgaattgtaataactagttgattgaaaggtatataatgtattaatttgaaaaataatttgcggaaatgatgcatttttacagaatgttcgaaactaggattatattgcaaagctttactgtaatctacttgcgtgccttgtatattcatattaggaaatatttccatgccatgtattgtgtttatagttaagcaagatatcccgtttttatcatataggctagggtatgtgtttttgataccccaaaaatcggccaatgtgaagtcactaccacttttaaaacttttgtttttgcatgcataacagcatgggcgtaaatatatgtcatgtataaatcctcttagatatggattctttcttaaagtttctgatagacttttctgttttttgtattgtaaaacaaaactatagttttcccaacctagtttcttgtttctgaaagaaatttgttgtatattgtttagcttagcagttttatttaggtatgtttcccatattttagggcttggaaccccatggcaaacaaagtctacagttattaaattttcatagtcttttcgtagaaaaagttttaaaccatggatttggcagggagttccaacaaacatgactattttccctctttttagaaaattttctgtgtgaataaaagaaagtccaattttgctttgtacatatttactcattcgtaacttttctaaaccactaatgctctccgtatatccgtgaatgacattccaattatcatcgaatatagctccaaaaacaattcctcctttttgaataacccattcagcaattaatgagaaagctcctcctgatgaggattgtaattgtatttcttgatctggatgtttgatggcataaatatttattggttgtttggagtcggagagtgttgtttggggacatactttgttgcatagaccacaattaatgcattgttctttatctataattggatactcaaaaccttcttcatcagattccatttttatgcattgttttggacatttttgaatacaggcataacatccacagcaatcttgtttatttgttatttggagcattcttttaaagctttgtgtagaaaaaatatagattcttttctttgtgtctgtaattttatatcgactatattccaattaatagtagatgtttgttggggtatatagttattggttattaatctattattgagtccaaacaatgatagtaaagattgaattcttgtatttccaccagcagaattacttattacgtaaaaatttttgtgaaaaaggatagaaaaaacacatccatgaaaagaatcagtaattattaaatcactatagtaaatagtagataaccatttttcaatactgttttgggtattgaaaaatttttttagaatattacgttcaacttttgctgttaacaattcaatatctttatgcaataaagaattgataatattttgattgcttggactgttataatctaataaataagtgaagcagtgttgtttttgggttttgaatggtgattttgttaatatttttttataacagtctgcttctagcagcattgtaggatcaagtacttgtattgcattattgactcttaaaaattgagaacataactttattccagatgtttctcttacagatatatatgaaaattcatttattaaattttgagctgtatttgtttctatgtctgtgaaatcccaatgatcaatgccaaaggaagcagcaaatgcaattttaggaatacaatttggaggaactgtttttaaaaaatatctatctacgtttttttttctattaatccccatatcaggacgccatacttgatcactccctaccactaatatatttatgttatttatgtttaattcatcatcgcaaaaaggttcatgaagttttaataggttgaagttttcttttacgaacttgtatatatttgatcttttatataacttttgttttaaaatttgttttatgttattgttaggctgttctataatgattggttcaaatcctaagttttgtatagctttttgtaaagcaaatgcttgtaaaatacctccataattaaaatggaaaggtaatgtgacaattccaactctcatcatttgtttaaaatattaagaatgttttcagcatataatttatgatatttttcccacgttaacttttgagctgtttcatatgcttctttagacatttgtggaatcatatcgcgatgttcaataaaccaatctaatgcgcttttaagagatgcttcggaagttgcttcatatacaagtccgtttttgtagttttcaattgcatcatctcctcctgcaaggttcgatataagaacaggagttcctgtacttaatgcctctagtacaaccataccatatccttcacctagtgtaggaaaaacaaacaagtcagcatcttgatacttttgtgctaaaatatcgtgtgtaacaaaacctagaaaattgatattattaatgccatgatattgttttataatttcattgttttcattgaatgaacctgctaaatttattttaatcttattagggctatattcttttataattttaagcaaatggtgtaggccttttctatatgatatctgccctacataaattaatttaagtgcttcattatttgtattttttttctttgtgaattgaaatttattgatgttaacaccgtatggaactatttttattttttttctatctataccacaaaattccaaacttttagttacaatattagaaggagaaaagaaataatcgacatattttaattcttcgcgaattaccttttcgtattttatattccatagatatgcttcctccttgtaaaatccattgtggtgatagtttttcatatctttttcaaaattagctttcataaaaggacgcattgaaattgaaacatccataattgttgtaatttgaggagcttgtgttttgatatacttaagaccttttctagaaataccatcgtatacaataattgcatctaccttctcttttattgcgatttgagctgctttatctgcgaaatgatttgataatgatatgtttaagtgaaagtataattttgaaagaaaaggtaacttagatataagaagaactaacaatccccaccattcgtatatttgtatgacttcctcatcctttagatatggacattttcttgtatttgctttttttagattttttccttttagtaaatgttttattttatttgtgagagaattgtctttatcgtaaacagttgttacatatttgtaaaatactcctgcttcttttaatgctttagctgtttcaaaagaatgctgttttcctgggtgtactaataataccttcatattttgctatctatttcctgttattattttgtaaataaagtttgttttattgtctagtgttttggctataaggatacatactgggagaacaataataggggttgatacatagattatgagataatctatattagaatttcctaaaagtaaatataataatttctgaactacatttataataaaaaaatgtgtgcagtatatgaaaaatgaatatttccaataaaattttggtttaatggaaaactgcgttaatataggatcggatattttccataaaagtattggtgctattagtctgtataggtacatgaaatcaaaatgaatagccaatatcataagtgtaatgaaacttactaggtataagaatattagtgtttttgaattttctttttttgtgaaaaaagatgttagttttttcttggtgaataatatacctgtgagatatataggtaaccaatacagaggattataatagtttatattgttacttatataaatagttatgcaagataaaataatgcagaagatagtggataatgttttttgtgttgcccattgtataacgggagataaaattgtaaatataaataggtttttaataaaccataatggggttaaatctgaatttataattgctattaatatgctatgaatggaattcagattattattcatatgtaagtatttagaaaaaggagaatgtaaaataatccaaaaaatggatacaaaaaaagtattccataataaatatggtataagtaatgtctttattcttttctttattttggataaagtatcttttagtgtagaaatattgtgataaaaaagatacgctgatattatataaaacatgggaacagctatatgtccaatacaacttatgtatgtcgtcaataattctataaaatttgataagtttgttccatcgttattccatcctaatgttactttacagttagaatgcaaaagaacgatgaggacagataagataaaattgaaaaataatattttataagaaaggtatttgttcattgtaattattgttgggtaaaaatgtttttaacgaatttgttttaatagacgtcgtcttataatcttttttttatatataaatcttcctattataggtaagcagaaaacaataaatgtttctatctgtccaaccacaaaactaaatccatgagaagctaagcttggtatatgaaacataaaacatagatagacaataagatataatgaagaatagccaattcgcttccatacatacccaaaaatatatccaaagatgtaaaataaaataaaacctagataccaaaaagcttcaaaagcctcataataacctgtttgtgttgtcacattatgggtaacacttgttatgtacttatcatttgttcctgctagttttagattctcttttccttgtttcccaaatataaaactaggaaaataccatgtaacaatgtcatcccaaaaagatagaccaaaggtataagtactattgtcttttgcatgttttataaataatgcagcatttcctaagtccatgccatggacaagatttggagatatatatgattgtttataattttcccatatatctatttgttctttttcttctttattgtcacgaagatttcctcgtattaaagctatactagcctggtatattgttccagttgtaaaaaataggataataattattttaattgctttttgccatcgtggttttaacattgcaagtaatatccctagtgacataaaaagttttacgacaagagttcgtcttgctagcattaatatgatatagaggtaataaatgctgcttatgattaaaatgaaatagataattttggatgctttttttcctttgatgatatatgttaaggcataaaacattcctatatcaaaatataacataaagaataggagtatttgataagtatgattagtcctaatatcactttgatcagagagaaaatgagctactacttgaagatagctttgtattgcacaatataaacctattaggaaaagtgctaaaaaagtatttttggattttactaaatcaatatctctacaagaatatattggggaatcttgcgctttatcccatccaaaagacagtgctaatgttgatgttatcatacaataagttaaatcccataataaattaggatcataatgtgtattatagatgattacacaaaattggggggtcatcattagtacactggctaaactaaaaatgaaaggaacctgaaatacacctaattttcgtttataatatttttgtattacccataaacatgtaactatatataaggatagtaagattaaatattcgtttattaacggcataatatctttgttttataaacttaattttgacatatgatcataggaaatctggattgaagttggtttccttttaaataagtcaaaaagagaagttgattttaaagtattgttggtactaattcgcaataatcagaaagtatatatgtcattgctatttatttcattttgtttttcaagaatatacttatcatatttttttcttgtctgcttaatccgataactataataatcaaacttaatgaaatactgtttaaacagagaatcgagattaacccccaaatagtctgtggaataaacaatgtaattattttgcatataaacgatgctggtacagctacaaagaagcaaggtttgattacttttttaagtaattcatttatttgtatggttgaaacttttgaagctatccatattcgtattgtgcaaacaaatatctcatacaataccattgctattatcagggcattagggttattggttattatgcctgcatagtaactgataggcaaaactaataaatatatagcttcgggccatatcataaatttagtaatattgccggttgcatataccgctgtacgtattgtttcaaaagaagcataggtaagactcaaaaatatagtacactgcgtataagtcactgcatatggtggtacatcacctagccaaaggtgcatgatatattccgtttgaaaaaggaatggtatcattataaaaaaaataagaaatacttgaaatttacttcctgcatagataagttttttatgtatatccagctcaccattggcatatgtttttgttatttgtggagcgatggcacgctgcaaattttgagcaaatgacaaaactgagtttttcaattgcattgaaattgtatatacagcattaatagccacaccaaatgtaagattgataacgaggacaaacccttgtgacgaaagaacctgcaaagcaccggaagcagaggatataccggcaaatttgccaatttgcattatttggtttttgtctataatcatataataatggacttccggaaatttgcgatggcaatatatctgataagctattcttattaatatgcttattgctgccattaatatagcataaattaataaacggccagtaggaaaatagctaaggcaataggctgaagcacatgttaagattacttgaagaatactgatagcagcaaaagcattcattttttcatgtgctacgattagtgaattataaggaatgcttataagattgactatacaagtgagtactgatatttgaaacacccattgggctgcatccatactttccgctggtatgtttattttggtatgtagaaaccataggcctccgatttcaagtagtataaatatgattccggacaataagaatatgacatttaagcaagaacaaaatactttgtttggatcaccgttatcacgtcctatttcataggtcagaaaacgttgtacggcattgcccattccaccactgaaaacagcgaacatactgacaatactaccaacaacaccatagattcccatatcctctacaccaaggttggcaagtgttaaacgtgtggtatacaaattcaaccacattgtaaacaacatacgtacataaagtaatatggtgtttttggctaagcgatttttattaaaattgtcagacattgatgagtatttaattggatatgtcttttcgtaattttcggattcgaaacttataaaatggtagaggttttatacctaagtgtttattttatcaaaaacaagaaccatttccttattcaggttattaatctcttgcatctttgtttctattccgttttgtcgatttgttattttttttgttcttcaatgcatctttctatcattccctctaaattggaaacagaaggtcttacatcttctttccaatgaatattatcttttattgcttgcgtgcattttgatgagaattcataagaatgtagatgttctctaatacttgatattattctcttctttttttgattatattggaaaaatcccaaccctaagatggcaattatgatcccaattaaaggtgcgaacgtcattccaatcagcggtatcatgttcctttccatcataaccattgtcgcagctatagaaaagggagttatttcagggaacaatgcattgtaatgttcttccatctctaaccttagagctggaagattaattttgcagttcgtgcccagctctatattaatgatatatttttccactgtatgcttaatctctttctgtaatttatcgctcgctgagtttaaatatggaacaatccgtccttctaaagcagcattgattctttctgtacattttctttgtattgtttctattgttttagtggcattatcttttagccccaaagtaaacatagaaaaattaggtgtaaacacttcatcaacccattcctcaatcttgctgtcaacgctcaatatctcggtttctatttgtatctttatgaatttatatgcatcttcttcatacaaagaacatatttgggttatttctgcaatacatgcttttgtttcggtttcattgtttctcagttgtttctttttctgcagacaaatatgttggctattctgtaatgcttctattttctctctaataaacctttcaagctcctctctgacttttccaatcttattacatgctatttcattctttatgggtatgcgattcgtttgcaagaattcccatatttttttacggacattatcaaaacctgcatcgttgagtacagtcttcttctgctcaatcctgtttaattcctctgccgcacttacaaaaaacacaccatcttcatggagaatagacttggatgacaactcttttcttagacgaaacttcaatgtatcgcattcttcctcgtcaacattctgtaaaaggtctgaaaatccaatagcaaagaaaatagatgttattccgtttttctgcaaatattctattttttccgcatctaatctagagtttgcctgtgatatatgcatacaatatatcacagcatcggctttttttaatgcattatttgtttcctcatcatccatatatgggtcgttaaagcccggcgtatcaacaataacaatgtctttttcacagaaaatattgttgtggaagatttctaatacatcgccagttcttggtatataattggaagaatttctgtcaacgaattcttttaattcttttatacttatttctttcactaaaatattccctttttcgatatattgtatctttagatgtgaattacaatagcctatcttacataccatactagtactgggatttatattttcaggcaagattctctcttctatcatagcatttatgaaagtacttttgcctgaattaaatggcccaatgacagtcacagtcaacggactggttaaattcaaaaggacatctgacaaatcattgaccagtcttatctcgtcatctgatttgattatctcaacttttctcatcttagtaataagttgcgacgcagaattgatagtttctaatatatattttttattcattttgtttatcttttatgtcgttaaaaagttgaggtatttcatcaaagttgtcaagccagattatttgaaaaccgaaacttttcgcatccaactcttctaaacacattatttggttcaacaactttgtctctgacagaaaacggttttcattattcaaatgtatgtcaggaatcttttttattaaataatggggagtttgcctgtcatgcgtctgccaatcttctcatatttgggtctgtaaagctgatacccacgtataaacaaatattttcgtctaacactcctaattgttttatagtttcattattcgttaaatctgcatattgtttatggtattcatcttcactgaaaacaattcttctgttgagactaacttcactttcttgtggaagaaagccatgaacatgatgaataggaatgccgtcaccatgactatgggtatattttattccattttccttaaaattgcgttccaagagatcatcaaaattatatgtaattatttcttttacaccttcattacgactattactggaacaaagttcaacgattgcatgaattgtatttgtccaatctttattcagtcctttataaagattcctttgaatacgttcataaaaacatttacagtctgattgctttatcatgcgtgccagcatttcctgactaacaaataattcgtttttaagcttatcacataaaacatcagtataatcggaagacaattttgaaatctctaaaaacattgaaacaagcagtttattccatgatggaattcctgagccaatagatattccagctccacaaaacaacactagatttttctctttatatgcgttctttaattgaataagagcatccgacctgcatttttttctaaacttgtcattggctacgacttgtcctgcatttattttgagataccggattagttcctcacaattttcttcgacggtctttgttcttgttataaaaaaacgattccgattttctgaaaatttaaatattggtaaacgttcctctatataaataggcaagagacgtttgttttgttccttttcttcaataagggcaatctcatgatagtatctaagtaactttttttcttctgtaattcttgacaatatccatattatggaatcattctcttttaataaactctctacatgttctttataattagaattattgttgtaagcagcacactgaacacaaatatcattctttcttaatatgtgggttagtgtttctgcaaactccttatcttggttatgatattctatatgtacatgtggtatcatagaaaaatctgttgttttttcaatgttagcattttttgttaatccattgttttgatatccccgttattttatcattatgtgctatgtcatttgccaaagaactaatgatagacacaaagaaagaacttacgattcgttgtgcaatgttggtgtttatgttgtcaaactctccatataatcctgccctgacagcttcggagacctttttatcctttttttagggagattggcaacctcataagtgataaacgcaatcaataacggtattataattcaagcgattgacatatctcctaaatgagccccaacctatgtaataaacttcccttacggcatggaaacaagacccgtttaccaacgaatgaatcttgtttaatattaaccatttctttatggaattctatactccgatccaagataggatatgaaccttacctttttttcacacggtcacagatcgaacaactgcttttttataaattagtagatagtagagaaaatcttatttaacggtgaatttctaaatgcgtttgcttcctctcgataactttgttacgaagtttatgttatagaaaaaagtatcgggaaagaatagtctgtatcacagctcaagcgtgtctgttgcctttgaaggcacttttggaaaacagttcattcaaaatgacggtaacatctgtttcaagcaaagaataatcctgtgaattttcttttctgtcatatcagttgtattccgtttttcaaagcttcctgcactaccagtgaatcctcatggtcaccgatgacgtcaatcttttggttgcccaaatgcagtttcaagcgtgcggtcatgcggatgcgtgccaatacgcctttcttttctcccgtgctgcggactaataaatcaatatctcctccacgcttttcgtcattcagacgggaaccgaagagatataccttcactgtttcaccataaatatctttggctatttggatgatggtttgtttcccctccacatttcctagcgtccaccatccttatttcatcttctccacaaaccccaccggcatatcaaccccagcacatcccaacaaatccagtctcaccaccactttcgcctttccatccacttccaccagttctccttccagtccctttagcggacctttgaccactcgtatcaattctcccggaaccaatggtgcggcacacatctccaccgcctcgtccgaataatccagcataaatttgaaccgttccatttgctcgtccggaatcaccgccggagtatgttcgccatgcagcaccatataccggctgatggccgacagcgtgagcacctgcgaacgttccgccgcatccacatggacaaaaatcatcatagggataaccacccgttctattttctttttccggtaagtccattggcggatttcttcttgtacaggcaggaagttttctatattcattgcagtcagccgttcggccgtcttcttttcgtggtgaaggcggacatacgccactagccattttttcatattcggaggaaggaaaagtaatgttagatgttctaaaaattgaaagaaatgatgcctcttaagcacgctacgctgttacctgtgtcattcccaggtaagcttgtcgttaaattctgatgcaaatatagacaatattttacgataacaagctatttgttcgcaaaaaatgaaaaaattaacaagaataatacatttattcctacttttgtactttttatattttaaatcatattaacatcatggaaaaatcaagatttataagaaaaataatggcagattgcagttctttcaggaactggagatagtaatggtgaaatatcgcctgtccggtgaaggatacaccgatgaggaaatgagggttttgaaacacatgtgtaaggatacactggctgatataaacgagtttatgcggaaaaaggaggaaaagaagaagaaagaacggaaagagaagaaaaagaggaaagaaaggaaataaggaataaaatgtaaaaaaacgctaaaaggaagcctcccggttatttgtacacttgtgtaatgaatgggtgttgtaaatcaatactttatgtttggttagtgtacaattttaacttttgattgtatgggtttgcaatatacttttgttttcatggtggagggaaatgccctccttttgataatttaaattcatacatgaatggtttataccgatttatgctctttctatttctcggtgttcgatgaacatgccgtggatatgacattgaaagagtttgtggaacttctgcgtggcgaacgttggaaagcgcaagtggaagagtatcagcgcctgaaggcttcgggccgggagacagaggccaagaaattaaagagaaaactggccgcgctggtgatagccgggcgttgcgaagggagccatgccgaaactaatctgaagcagtggagcggggacgccatgctggatgtggataaatgtaacggccgtgtgtctgagttcttgcaggtcttgaaggacactccttgggtgaaggcggcatggcgcagcgtttcgtacgacgggctgaagctggtggtgcgtgtggaagcagagagtgtggacgagtatcgtctggcatacgcgttggtggcatggcacgtggcgcagcttcttgcctttccctgtgacatgagttgcaaaaatcccacccgtccttgctttgcgtcgtatgatccggaagctatttttcgtccggataccgaagtttttccctggcgccgctttgtgacggagcatcccgacagggtgggggagattctggcagagttgaaagtgaagaccccggcaagtgcatccaagcctctcgttgcggcttcgggcatgctgcacacattcttcaacgagttcttggcgcagaatccctttgtggatggcaaaaagaatgagtttttgttgaagctgggacgtatcgcccgctataaaggagtgggggaagaagagttggtccggctgaaaacgctggcggtggaaaggctggcgggtatggggtgtgccgccggggatatacctccgcgcatagactccggataccggtatgccgacatgaacaagggccccgaaacacctgcttccagggctcacaaggctcaaggctcacttaggcggtattctgattccggcgaagagggtgaagaagctgaaatagagaaacttgaggctgacaaattgcgccgcaatgttccgtgtcttccggatgagctgttcgaccgtttgcccgactttttgaagcgtggtttgacacacgtccgtaacaagcgcgagagggatattctgttgctctccatgattaccaacatcagcggttgtctgccgggggtgaggatgaattatggaggaatggtttattccgccgatctctacctggtggctttagccggttcgggcagaggaaaaggggtgatgcaactggcggcaattctgcccgcagccattcaggggtattacgatgaactgaacaggaaggatgagcgtgagtaccggcagaaattgctgaagtggaatctggaggaacggcttgccgctcaggaaaagagggttcccgatttggaccaatgcccggagatgccggtggaacgcatcctgaaggtggctcccaatatttcgaaaagccagttgatattggctttggaggcgggtggatcggtcggcttggtgatgaatgcctccgagctggatatgataagttctgccatgcaccaggagtatggaaaacatgatgatgtgatgcgtgccgcctcccagcacgaggaggtgtcttcttatttcaagacggatcaccggcttgttattgtgagtgatcctcatctggcattatgtgcttcgggtactcccgcccagttgcataaatttatttcttcgctggagaatgggatgtacagccgtgtggctttctatgtgggacaggccccctgggagtataagtctgccaatcccggcaaagtccggctggatatgcgcgcttatttcaaagggatgggcgaggagctgctgcgtatgtttatctttctctccggatcgtctaccgaggtgattttcaccgaggaacaatggaaagagcatacggagcgtttcagaacgtatctgcgtgaggtagtggcggaagatgatgattctccgggtgctattgtgctgcgccacggactgatgatgtctcgtattgccatggtgctgactgcattgcgtaagtgcgagccgcaatggaatacatcggagtggaaatgttcggatgaggatttccgtacggccatgcagatagtggatgtgttgctggaacacagtttgctgctttccacttccatggatgatactgccggaagaatcaggccggtaaaggcttttttcaaactgcgtcccgtcttgagaacaatgccgcgtgagtttacatattcggagctgatggcggctgccaatgaagccgggttgcctacagcatccgtgaaacgttatttgttgcgtttggtgtattatcaaatcgttgagaaagaggatggtaagtatagaaagaccggtaaatcttggcctaaattaccgcctaagtgagccctgagccttgtgagcctaaaatactggtaaaaaaggtcctgttgttttcaaaaaacaacaggacctttccggtaaaacaacaggggattttaaaaaaataacaaggtctttcgaagtaaacaacaggtcctttgggaagcgtatgtcctaaggttctcccagatgcctcactatgattgccacttcatgcttcagaaagctgtggcggaatttgttgtagcccgcttcgtttaattcttcctgcagcagcatatttctccgcatccagcgatatagggtttgcagggctgccgcagcggtccgtccggggctatataattctgccagttccgctttgtcatacgctctgataatgaatgctttttcttcttggctcatgttcttttatctgttttgattatagagtaaagatacacaaaatgtccttgttttcctactctgcctgtaagttattctcgacatttctcgacaatgttctacggctctctaccaatgtcgacacagggcttccgcttcatcgtatctttgtagtgtaatcaaaagtcaatcatagccggcttagtgattaatagttgattgtcagtgtgtttcttaatttaaaagttttaatttttaattttaaaagtatgggaagaacagtttcttattcggtagtaaagcgtaataatccgcttgatcaggatgcggtgcctaagttttatgcacaagctcaggccaatggccatgtagagattcgcgaaatggcggatcgtattcagaagacctgtacggtgacgcgtgcggatgtaatggctgtgcttgttgctttggaggatgtgattatggaggctctggaagggggcgagattgtaaggcttgccgatctgggtactttccagataggtttgagcggaagaggtgcggaaacggaggatacgtatgatgtgtcgatgattagaaaagcgcgtatcaatttccgtccgggtattgcgctaagcggtattctggcagcactgaaatatacgaaagtggataaattgccggtgaaaacgaaggaggagcaaaaacctgcttaagtagctggcggacaagtgtttaatttaaaaaagactgtagaatgaaaggtaaatctgtttggagcactattttgaaagtggtgattgcagtagctacggctattgcgggtgtagtaggaatcagctcgtgcataggaggatgagagtgattaatctgattgttgtccactgttccgccacaaaggcggacagggactttaccgaacaggatttggaggtgtgccaccgcaggcgtggaatgaacggacccggatatcatttttatatccgtaagaacggggatataaaaacaacccgtcccatagagaaaatcggggcgcatgcgcgtgggtataatgcgcagagtatcgggatatgctatgaggggggagtcagcgagcggggcaggccggcggatacgcggacggtgtggcagaaacattcattgcgtgtactggtcagggcgttgctggtggattatcccggttgcaaggtttgcggtcatcgggatttaagtccggatttgaacggaaatggtgagatagagcctgaggaatgggtgaaacagtgtccctgttttgatgtttcaaaagaaaagtatagtaaataatatttatatattaaaacataataagactaattctcttctgaatttgttaaaatattaacgttctagaaagaggattagtcttattttattatgtaattaattttgaaattactttttgtttacattttctgcgccgtatccatagccgtaaccgtattttttaccatatccgtaatacttgccatacttgccgtatccatagtaatatccgtacttttttttcttcatgtccagtccgttgataatggtacataggttgggcagttttttctgttcgcccagttcgttgattaaagtataatctgccttgtgggtgtagtctgcccggcacacatagatgctggcattggctactcgcgaaatcagttgggtgtcggtcaccatgccgatgggggcggtatccagaatgatatagtcaaaatgctttttcagtatgtcgatagcctgaggcaaagattcacgtgccaccaattcggtcgggttgggagggataggacctccgggcagaatggacaagttaggattgatgtttgaaacttgtaccagcgacatcaggtcggtatgttccggattagcgaggtactggctgatgccttgttccttgcgtgacaattggaaagctttgttcagacccggcttgcggatgtcaagccccacaatcacgattttctttcctaataaagccaggctgacagccagattggaagcgataaaggttttgccttctcctgtagtggtggaggtaaccaatataactttctcgttactcttcatcatataaagtacattggtgcgtacattacggaaagtttcggccatcaggtcgttttggttttcgtgtactacaatggctccctccgaagatttattttcagagaaaggtacgtcaccgactataggaagggatgtgattttttccacatcggcacgtccttctatcttgtatttaaaaagctcgatgatatagatcacggcaaccggcagagcgacgcctagaatcagtgctaccagataaatcatctttcctttgggagatacggggatggcatctgccagcgcttcgtctactatgcgggcattgttggcggtagatgccagagtgatggcattttcttcacgcttttgcagcagcatcaggtaaagtcctgctttgatttcctgttggcgcgagatgctgactagctggcgttcctgtcccggagcattggtgatgcgtccggcatatttgcctgcctggcgttccagatccgcctgggtgatggccaagcctctttgcacgctgttgatggtggtcagcacattgctgcgcatggcgcggatgctggcatccagattgactaccaccgggttgttttcctgagaggagcggagcaggcgcttgcgttccagcagcatctcattgtagcggttgatcagttcggtcagtccggtatctgtcaggcctacattgacaggaagtacttcgtaggcatgatccggattgttggcatagctggccaggaattgtaccagccggagctgggtgctgttttcagcacgttttttttcgtattccgagttttcactcaatgccagttgggcgtcgcttttcaagtcggtcagcccggcatcgcgcttgaaggtttccagttcttgttccgtagttcccagttcaccgttgatgatattaatacgttcatcaataaattctgcggtcttggtggccacttcgtttttatcgtcgttggcatcccggttgtagatttccaccagtttgttgataaaatccataccacgttgcgtatgcgtgctctttacagagatttgtgcgatagtggtggatttggaagtaggctctatgctcaatgctccccggtagctgccggccacactgcggggggaagaaacggtagccatgattttttgctcgctttttgcgattgtcgaatcagccggggtgaagctgaaagtccccgacggagtggtcagcaaggcaggcagtttgtcgaattgcttgctgtattcctgttctcctattgtgatcttcacattcagtttattgcccggttgcaaagtcaggttgatatatgccggagcagggagtttctgagcttcttcaggggtaatccatactttgacaggggaacttttgtaaagttctctatagagaaaactactttttgccgcatagctgatgtaaagatccagttcttccactactttcttgataagcgtgcgcgattgcaggatttctacctcattgtcaaaattgttgatggaagaataaaatcccaagtcttccaagtcggccatgccgctgcttgctttgctgtttttgtcattgtctttgatgatgacggacgccgagatgttgtataccggcggggtgtaacgcaaataaagccaggctcctgccatgcataacagaatgcatgccacgaaccaaggccaatgaatggtatatttaaaaagaaccgctttaaaatcagtcttttcttctttttcttccagatagaggtcgtcgtataaatcttctttcataattctgtttatttggcaatggttactatcaggctgacgagtgagacaagggttcccactacagagaaccagattgtagtactgttgctgattcctgcatttttggctttggtcttattgggagtgacatacactacatcattctgctggaggtagtagtaaggagatacgatgatgtcggcatcgttcaggttcagcgggataatttggcggttgccttgcgcgtcttcacggatcagtttcactttgtcgcgttgtccgtatacagtcatgtcccctgccatagccagtgcttccatgatatttactttttcattggtgatggtgaatgtaccggggctggcaacttctcccatcacagagattttgtagtttgccatgcgtacatttacaatagggtcttctttgatataggtcttcagtttctcctttatcatattttccgcctggcttttggtaaggccgccgatgtgcaatgttcccaaaacagggaaatcaatgtttccgttattgtctaccagatactgttgtaaagatggttggctggtaaggtttttgctgtttgccgtgataggggtggctaccgtcagattaaagggaatggcggcatcgggatcgctggtattcaccgtgatagtcagcaaatctttaggcatgatgtgtgcatcatacaagggtgttttgacatttgccatgtccagatactcggacccttgcaggtaaggtacttttttgtaggcgctgcaactacatagtagtagtgaaaccagcgcgaatagggtaagtttcaatcttctcattttttggctctctattaattttaattctctattttgaacttaataagcttgcttgtctttgcgtagcacatttgccacggttttgtacatgatataaaggtcgagcaggaaagaccagtgctccatataccatatatcggctttcacacgtccttccatgtcttccagctcacgggtttcgccacggaaaccggtcacttgcgcccatcccgtgataccgggtttgatgaaatggcggaccatatatttattgattatcttggaatattcttccgtgtgtttcaacatgtgagggcgtggtcccacaatggacatatctcccagcaatacattgatgaattgcggaagttcgtcaatattggtccggcgcatgaaatcgccgaatttggtttttctaggatcattgagggtggcctgtaaggtgtccgattccttgttcactttcatagaacggaatttataacaccagaattctttattattcaatccattacgtttctgacggaagaatatggggcccggagaagtgattttaatggtcactcctacaataaggaatataatggggaacaatgtgcataaaaagagtaatgagaaggctacatcgaatatgcgttttatcagcctgttttctatttttcccaaaggttccttgcggatgctgagaatagggacactgcctatcatttcaaagtacatacggtggcgcaggtagttgcgcacattgggcacactgtagaaatgtatcaggttgttttcgcaataattaatgaccggcacgatacattcgcttaatgccgagggcaggcaacaataaagttggttcactttgttttttgtcaggtaatcaatggtttgctccggctttcccaaataagtacaactggcagggaacttggcattgggggttgtgtcgaagtatcccagtacccggtatccggtagtggcgtcggaggtcatttcatgataaagttcggctatattttcggtgcttcccaaataaaggacggtacggaaattacctccacggcttctgtatagctgtatgcagaaacggaaaagcagacgatagaaagtgatgcagaggaaaagtagaatgaaataatagacaaaaaagcgattggagtatatttcaagttctgatagtacaattaagcttgttgacaatagggagaaataaaaaacgttacggagtgcccggaatacaatttgatcggcacgggctcctcgtcgatgtaatatgacacctcctgagatagtgcacgcaaaatagcatacgctgaatagagttagaatttggggtaaagtgccactgtaggccctctccccaaacaactcgttccatattgaattaaatgagatgaaaagtacattcagaatgactaaatctcctagaatgactgctaatttaagtgctttattaaatctctgaacttgtatcataggttaaattttttagatgtcagatctatattatgtttttaaaaggtgtgttttaaatatgtcactttttttctttttaatatccttctgttacttcgtaagtaacagaacgtgaattaatggattagttgtataattaatattctgtcgttttataaatatatataagagataactatgtgaaatatagtgaatttattgcattgcgttaatagtaaaaagcgcaatgtgtgttgttgtatttctttgttctccttcgatttgataattgttcatattattattactttttatctattatataacctttttaattaaaatctagaaaaaagctgtgcctttatttgtttgctatcagttaattgtctatttttgccctccaaataagatctgttacttacgaagtaacacaatataaatctattgataattagaattttatatatttatactctctttttcccattatttgaaacgtatagaattatcgcatcattagctttctttatttcttcattcttgaaatttttcaaatatgtttctgtaactttcactgacgagtgtccaaaagcctcacatattaattgttcggagaaattacaatatttggcaagggtggcccaggtatgccgggtagtgtatgaactgaccttggttgccactccgcattttttcgccaatctgcctaaattgtaattcatggttcgtagtgcctgctgatactctgtatatagatcctctccggtttttgttccactgaggatgggaaaaaggtagggagagtcctgattggtattttgatatttgtttatcagcttcattgctgttgtcggaatatcaacaatcatttgcccacctgttttatatcggcgataagaaagtgtgttgcctttcaagtcgcttttgtgaagatgggccagatcaacaaagggcattccgcgtaattgaaacattaaattagcccaaactctgcatcgtatcaaatcttccggtagtttctttagaggaacctcgtttagtaacttgtttatctcttctacttccaatgcgcgttttatatcgtttttcacgccggtgtagacatgatgaaataaacgggaattctcggttattatttttttatccactgctttgttataagttgcacgcaatgtccgcatataggtggaaacagtattccaacttagttgcttgtcacgcaggtaggtttcaaattctttcagattggctctgttgagctggtgaaagtaaataacctcacatccacaaaattcactgaatgcgttcaaggtgctttgataaatgtgagccgtaccataacgtttctcgtctttcagttcatcaatcgttttgttcataaactcgttgaatttttttttatttctcataatgttccgttttatagattttacaaaataagttgttttcttaacggaatcgaatataggttgaaatgttcgaattagaaaggttatttatctaattctgcattatttatacgtatcatccatccgtttactttcatttgtaaacatatataaggttgctgcggatcatttgttgagtcaagaaaaaatatcagattatagcggtcttgcctgtcaagatattcttgtggaggcatataggttgtctcgacattacgtgacaggagcagatattgtgtaagcggaatatcgaaaatctcttttccactaggttgatagattaaccgtagacgggtatcgtcattttccatcagtctcaatgtattcattccggcatgtactacctgtatgtcttccaaattggcgctttcttgcataaaggggagataacaggtggaaacggagtctatcggagtgttccaatgatccatgcatccgttgccggcagtcagttccagacggaaatcatctgtatccagcgggacggccgactgactttgcaatatgcagctcagaatattcgtgtttttagtaagagagagagccaaaacctgatattcgccgctgatatgcacgttgtccagccgcccgtggaatagagatgaaagtttttcggattgttctcccgcctcattgcgtaatagtgtcagtgaagtgggagtatgttgataatgcgagtccgacaaacctgcccaaaccagaaaggtgtaatctccctgaggcagggaggggacttggattatacattcattttgatggaatgtaagactgtctacttcctcccggtctatatagtttccttcctgatcgagaataaatagcgtgacatcttttacctgggtggtcacggcatctacattcagcatattataggtataggataactttaaccaacagcctgtgggacaatcggattggtcatcgtctacccaggaacatgcactacagaaaagagtacatagggcgaagaggatagtagcagttttactcattgtttttctattttgagactgttttattcaaggtcggcatcttggtcacggacaatccacggatatactccgaattctacgtccaagtatgctttgtattcgtccggatcgggtttggtatccggagtgccgggacccaggttcttgatgctggtaatattgacagaataaatattgttacgtacaataccgaattccattacgcccattgtggtaggatcgccgttatcaagatgtttgatccaatagttgtagaaggtggagaaattaccttcattcttggtgaaacgggtaatctgcttggctgccaggtctgcatcgctggatgcttctgtcaaaccatcaatattggcatcaccatgttcacccacagccgccagcgtggtgtagaatttatagttgaaataatacagtgtcttgaacacgagcgggtcttctaccggctggccgtcagtgccgatggtctgtgaggcttccggagtgaatgtacctttcagcatgatgccggtggtgtacaccgtgttctgtgccggacggaacatacagttttcaagacaatacatggaaacgtactttcctgcatcggccagaccggaccaattgctgtctgtttgttttgacaggtggttagtgtagaatgaaccgcctgtgaaactggtagtagctcctgctacggtcttgtcgaagaaatagggatcgataagataaccgttgttgtcggctatgttaccgaaatttcctgcttccacgctgtaagatgacggagcggaaggagtttcagatgcggcatccagtgtagcgacatgacggaaagtgtagaacttgtttgccagattgatgaatttgtagttgttcagccggactgtggcgtaagtcactcccttaggattcttcaacgtgtagatttccttgctgtcatttctaaccatcagtttggcaacggcacgttccaaattgattctgacgtgtgctctggtgtcgctcttttcgggagattctacggcaatgttcagattggccgagccacggttagacatgatgaatccctttccgggtacgctggttatcataccgtttccataagtggtggcgtcaatctgtcccaataatgttgattcctggcctatttctttttcgatgtcaaggttttgtgtaccgtttgctacggcaaggatgtcatagttgcccggttccaatatgatttccttgttgcaagaatagatgatggtttgtccttcttggctgttctctttgctggagatacccaattcattttgatctacgtcgagggtagtaaccaaattcttgctggaagaatcaaacagatagagtttcacattgctcactttgtattcttcggcagtaccgtcttcatagactccagagtcttcggcggaagcggcacggctgccgttagaagagttagggactacaaatgaaatctccatgttgcctcctttggctccggaaatcgaattgtctccatttcctgaggggacatctgcatcattaatacatcctgccattgcagctgcaagagcgaaggataataataattttttgttcataatgtaaaaatgttttagtaaaaaaatgtgattagtaaatctcatgtaatatcttcaggttttcatctgcttggggcagtcctgcttctttcgctttacgcagcaggttttctgcttcggtataattcccattcagcatttgcatgataccttgcaaaagggtcttttcgggagtctcaccggctttgtccaaatagagtgaggcgccttttgtatctccctgtgagagcaggatgcaagctgcattgagattggcaacgggatgttccggattaagcagaacggccgtcatgaaaatcttattgtattccggactgccggcagggtaggtctgggctatgcggaacatctcttcaatactcagattcttggggttgctttcgaaaacctgcttggcctgctctaccgtaaacggacgtaccacatagtggatggtgtagtctgaatgacggagacccgggaaccagtgttgcaggatgaaacggaactcttcgggataacgtttccgtattttccgttctttctcatcggggctgtttttgctctccgcaatatgtaacagttcctcgcgatgggaaataacggtatcggtcagcaacttgataaatccgtcccagtcttcgggggtgtaatgggtggtaaacaatgtatcattgaaagaatattggctgcatacatagtctttcagggtctgggtccgttcccgtgccagacgctcgttgtttgagtagggaccttcgggagaggcgtatccatgaatgtcaatatgtgaaatgactacattggtatcgttttttatcaagtcgatactgcgttttatctttgccagttcggccggattgtttctgtattcgggatagataattgtttcgttgagcgggaagtccagataggcacgtccgctttcttcacgcaatttcctttcttccatctgcggagtgataaacgctacgtgcggatggatatcgggaagcatattcaggcgggtcagataggtggagtctgtatggcgggggactccgcatccgcattctttttcgatgagatgcaaggaggcatgtttcatccagtgagtgaaggggatgctgcgtaagtagtgtacgctttgtttccggtcattgcggcggcgtaactcttcatagtctttttcctgccggccggtttcacgttggaagaaaatatgttgtttacgaccgttcacatagatggcgggaagctggatgaagttgtccaggctgtcgctgagctggggaaccagtatgactgattcgttagagggaatctgtctggtaatgtctacttgcatggacactaccagactttctcccatccggtagagctgggaagaggcgatgtaaatcgaactgtcccgttctgccggctgcgctgatgagcaaagcgtaggaaaaataaatgatataaaatagaataaatatttcatggctctttagttaaatatgtaaactatactcagggatgctttggaggggccgaaatagtgataatggcctttttccagtaattcggcacacacgtcagggcatttatatttcttataatcgatatattcataccctacaccgacggaaacttctatattccagtggcggttgagcatgatgtggtatccgtaacttatgcctccaccggccagccagcctgcatatcggtgctctttcagccaggggaagagcccgaaaggcatctttttccctcctacgttgaactgcgctccgttgagataggctccccaaaaactgccgttgaatttctggcaagtccagtagcggtattcaggttgtatgagccaatatttgttgacatatccttccgagcgtttccacggacgtatgctgccggacaaatcgaatgtggatttggagccgaaggcatattccacaccggcatttagcgcaccgttggcggcggaaagcaggttgcttttgacagccattttctgtgcggaaacggaaagggcgccgccgagcagaagacaagaaaggatataccgggttttcatattttattgtatattggtttgattggattcaaagaatattttcaggttataggtggcttcttccgagccttcggctttggctgctttcagcaggcggatgccttcgtaggtgttgttgcacaacagttcgtaggcgccacggcagttcttgtaggcaagcgtttcatgggaagccatttgcagatagcggccggctgcctgtgtgttgccccgttcgatggcggcagcagcggcgttgaggttggcaacggggcttgccggatatatcttgacactaatatctatgattttgtagaactgttccggaatgttcttgtagctgatggctacggtgtaaagctcgcgtaacgaaagcatctgcggattgatttcggctatgacacgcgcttcgtccagactgaagttcagctctttctggttgcgttcatcggttgcgtcgctttcgggagatacatagcttcctttgaaatatggtttggcagatggtgcagacggggcaggggaaacaggacggtgttccggaacaacgggggcagagggtgaggctgctgccataggagcttcccggttcctgtcctgttggggaacgaaattatctgttacttttgctatatgggttgctttgtccggaatggggatattttcactttgtactttctctccgttgccgttgatgacttccttcttgaggttcaatgtggcgaactgtacccagtcggctgccgggagggaagcacggtagtggatagtctgatcgctgtctgtcaaggggatagcggtaaatacgggagttacattcgctttgcctcttcgtttgttgagcgccagggtgcggcggtatagccgatgtgcacgttctccgttgagcagaatttgaggtaattctgcagtgtgggttccgtctgtgaggacaggggtgagacggatatggcttttggtgtccatctggggaacattgagagtcattttcatggacactatggcagagtcctgtccgagagtaacggagggaggcaggatatcaagtttcaggttttgtgcagtggcaaaggtgccgcataataaaagactgaatagtatgtttgtcttgagtttcatgactgatagggtatatttgcttttatatttattgaatgaaataaatgaatgatatgcctagctgggtaggtccgacatagttggagtgggatttcttaataagtgcgtctcctttgacgggaccgtatttatcataggtgagatgggcgtatccgacagatatgcttgcttcaagactccagaatgtgctgagcaaccattggtgtccataggtaatgccgcaacctatcagattaccctgataacggttgttctttactgttgtaaaaggagtggttccaccgaaattgtattgggcgaaatgggcttgcaccccgaaaaaacttcctatgaatgtttcattgagccaccaacgatattcgggctggatcagaatatgtttcatttttttgttttctcccagattccagggattatagttgacgctcagattgaatgaatgggtgtcatcacaccttatttctcctcccaggttgaaagtgccggtaaggtcataaagaacattgctttttacagcgatactttgagccgaggctatacgcggagttataactgctagcatgattgctattataaataagtaagaatgtcgcattgtcaatatttttgttttgttttttttctgttactttagaagtaacggaagggaaggagggagggaaaaaaacatgaaaacagcggtaaaataaagatttagtggctgttagagaagataaaagactgggaatgtagcttaactcatattgacgatcagagtatgggcagggagggctatatgcggaataaaaaaattttttgaaataaaaacgaaaaaaaagtgtagaaatcttgcactgtatctaaagtttgtatacttttgcttccaaaatctgttccgttacttctaaagtaacagtcttgtaatttactgttttataatgtaatgtgaagttttaaaattgattatatagaaatgttaatgtgattaattattactttatttgctttgtctaattcatcgtttttaaaacttttcaaataggtttcggtcacctttgtggaggagtgccctagggcatcacaaatcaattgttccgaaaagtggcagtatttagccaaagtggcccaagtgtggcggctggtgtaggaactgacattgagtttgattccgcagtataccgccagttgtttcaggtcatagttcagtttccgcaaggcatgttggtattctgcatattcttcttcgcttttccggtttccactgagaatgggaagcaggtagggggagttggaatctgtattttgataccgtttgataaggttcatggcagcgggaggaatctctacggtgagcagggttcctgttttgtggcggcggtaggagataacggaatcttgcaggtctgttttgcgcaggtgtgccagatccacaaagggcatcccgcgtaacaggaacattagggtaatccatgcccggctctcttccatactttgcggcaaggggcgtggaagggaggcacttaataatttgctcatgtctttggcatcgagggcgcgtttggtattggcttttacaccagtatatacgtgacggaaaagacggggcttttcttctgtaagaccatcgtccacggctttgttgtagatgcttcgcaaggtacgcatataagtggaaacagtgttccaggtgcatcccttgttacgcaggtggttctcaaattgtttcaggtatgaacgttccatctggttgaaccggatggtgtcggtcttgcagaagagcatgaaggcgttcaatgtgctttggtagatgtgggcggtactgaaacgctcttcttcttttagcgaccggataagttgttccataaatagggtcaggttagatttttctttcattgttctttcatttttaaaatttagatactgtatatttctcagtttaaatgcgcattctctgagttaatcttaaaagtccggatgagtttatttgttcatcgttttatttctttttgtgatagcttgtgctttttcctcgctttttgacgattggcggaggtcttgtgagtacgtcttgttgtttttttcgtctaactgtaaataatttatatgaaaagaatgaaaaatatcaggctaggaacacttgtcgcatgtatgtgcgtgttatgggggtgcgagaaacccaatgtgaatattgtgatgccgcaggaagcgtcgaaccgggtgctgtttgctggagaacatttgaaaaaagcgctggaagatgcggggtattcgtctgttatgttgtcggatactgccggtatagataaagatgaggtctgcatccgtctggaacaggctactgatacagccggactgaaaaaggagggatttaccatttctacctgtggaaacatgactacagtgacaggaaacgacggaaacggtgtgatttacggctgtcgtgaattgatagatcatgtaggacaatacaaggatttgaagtttccggcacaactgacggatgctcccgaaatggtgcttcgcggaggttgtgtagggattcagaaaatggaatacctgcccggaagaggggtgtatgagtatccctatacgccggagagcttcccttggttttatgataaggaacaatggataaaatatctggatatgctggtggaaaaccgtatgaattccttgtatctgtggaacgggcatccgtttgcttccttggtgaagctggaagagtacccttttgccgtagaagtggatgaggaaactttcaagaaaaatgaggaaatgttctcgtttctgactgccgaagcggacaagagaggtatctttgtgatccagatgttttataatatattgttaagcaagccttttgccgagcattacgggttgaaaacacaggatcgtaaccgtcctattactccgctgatcagtgattatacacgtaagtcggtggccgcgtttatagaaaaatatcccaatgtgggtttgctggtatgcttgggggaagcgatggatacctacgaggatgatgtggagtggtttaccaaaaccattattccgggagtgaaggacgggttgaaggcactggggcgtacggatgagccgcccatcttgctgcgtgcgcacgatacggattgcaagatggtgatggatgccgcgctgccgttatacaagaacctctataccatgcataaatacaatggtgagtcactgactacttacgaaccgcgaggtccttggtccaagatacattcggatctgagtgctttgggaagtattcatatcagtaatgtgcatattctggcaaacttggaaccgtggcgttggggatctcccgactttgtacagaaagcggtgaatgccatgcacaatgtacatggagcaaatgccctgcatctgtatccgcaggcttcttattgggactggccgtacacggctgataagttgccggatggcaaacgggagtatcagctggaccgtgactggatatggtacaaaacctggggacgctatgcatggaactgtcatcgggaccgttcatccgaagtggaatattgggacaagcagttgggtgattattatggtacgacttctgccgaagccggagatattctggaggcatacgagcagagtggagagattgctccgaagttgctccgccgtttcggcatcacggaagggaaccggcagactttgttgctgggtatgtttatgagtcagttggtgaatccttataaatatactatctatccgggattttatgagagttgcgggccggaaggtgagaagctgatagaatatgtggagaaagaatggaaaaaacagccacatgtgggcgaattgccgttggatattgtggcgcaggtggtggaacacggtgacaaggcggtggcggccattgacaaggctgccgcagcggtgactcgtaataaagaggagttcggacgtttgcagaatgacatgcattgctatcgtgaatttgcatacgcgtttaacctgaaagtgaaagctgcgcagcgtgtcttaaactatcagtggggaaaggatctgaacgaattggatgctgctattccattgatggaacaaagtctggatcattaccgcaagctggtggcattgacggatagtacttattattatgccaacagtatgcagaccgcgcaacgccgtattcctatcggtggtgacggtggcaagaacaagacctggaaagagatgctggtgcattatgaaaatgaactggctaatttcaaggcgaacttgcagttgctgaaagataaggcggcaggtaaggtgacggaaagtgcagctgagataaaacctttgtccgccgcaaatgtgaagattctgaacggactgactccggtgaaactggcgacgggtgcaagtctgttttccaatgtgccgggcaaggtagatgcgttggccgccgagttagaagggctgactgcttatagaatgaacggggatgtgcagcgcaaggaaggtacgacaatagagtttgaagcggctgctccggtgaacttgttggtaggttattttcgtgatgaccagaagaagtatgcgaaagctccgaaactggaaacggacgcttctgccaatgattacggtcaggcggaaccgaaactgaccaatgccgtacgcatagcgggtatgccgctggcgaatgtacatgcatatcattttgaggctggaaagcataccttgttgctgccgaaaggatatacgatggtgctgggatttacagacgcgcaggtaactccgcgtaatgcgggactggccggtgcggaggaaacgatggactggatgttctattagtagccgtagttccagaggctggaatcgtagtatagcgtaaaattttcaagtatatcttgagaattttacgctatttttgtacatagttctaagatttttataaggaaaagttgcttaactgataaacttttttttatttttggcgtatgagcagaaagataatagcatacgaaaactactattaaagatttttttgatgctctggataaaggtacgcaagaaaaagtcctatatggattactcttattaaagactcaagatagactaccggcaaagtatgtgaagtttcttaaagagggtctgtatgagttaagaatagagtggcaaggtaatatctataggattttcttctgttatgatgaagggcatattgttatattgttcaatgaatgctttctttaccgggcaaataattgaagaggcaagaaagaaagcaaatatgacacaggcgaaacttgccgaaaagatagggactaataagtcttatatttcccgtgtggaaacaggaaaaacagagcctaaggtttctactttttatcgtattgcttctgctttgggattgaatgttgagctgacccctgctatgtgatggtaaaaatagagaatgagataaaagttttctgaatgggtacattttcttcttttgtccgtcttgccaatagataaaaagataattatgaagaagatattgatactggcattttcactgttgtcattgggaacatacgcccaacgtgaagttccgcaatcgcgcatggagcagatttatgaggaagccaagactccttataaatatgggctggctgtagctccggccgacaacaagcataaaatagactgccctaccgtgttccgcgaaggggataagtggtatatgacctacgtggtttataatggtaagagcggattggacggacgtggatacgagacatggatagccgaaagtgataatctgttggaatggcgtacattgggacgtgtcttgtcttatcgtgacggattctgggattgcaaccagcgtggtggtttccctgcattgccggatatggagtggggaggaagctatgccctgcagacgtataaaggcaagcattggatgacttatctgggtggggaagggactggatatgaatcggtgaacaagccgctgtatattggtttggcctggacagaccggcctttgggttctgcccatgaatggcaggcacaggatcagcccgtgatgagtatccatgataaagacgcgcaatggtgggaaaagctgactcaatataagagtgtggtctattgggataaggagaaaacattgggcgcacctttcgtcatgttctataacgcggcaggacggcatccggaaacggatttgaaagcggaacgggtgggtatcgccttgtccaaagatatgaagaaatggaaacgatatccgggcaatccggtctttgcacacgaagcggacggaaccattacgggggatgcgcatatccagaaaatgggcgatgtgtatgtcatgttctacttctcggcttttgaaccgagccgcaaatacaaggcatttaatacatttgctgccagttatgacctagtacattggacggattggaaaggggcggatttgattatcccttctaaagactatgatgaattgttcgctcataagagttatgtggtgaaatacaatggggtggtgtatcatttctattgtgccgtgaatgacgcggaacaacgtggtatagccattgctaccagcaaaccgatgggacgttcacaagtgcatttcccggaacgggaggtgaagaatcgccggatggtgatggaattggataaaggatggaaaacatggctgacggaagcaactcatctgaaagggttgtttgctcaaaaggcaatagaagtaaatattcctcataactgggatgattattatggctaccgccaactgacacatggtaatttgcacggtactgccatatacgaaaagaccttcacattggatgattctcagtttctaatttccaactcttcattcggaaaacgttattttcttcgttttgagggagtggggacgtatgccactataacgttgaatggaaaggatttcggccgtcatcccgtagggcgtactacgctgacattggatgtgacggatgcgttgaagctgggagagaataagctggtagtgaaagcggaacatcctgaaatgatagccgacatgccttgggtgtgcggtggctgttcctcggaatggggattcagcgaaggttcccagcctttgggaattttccgtcccgtggtgctggaggctacggatgagatccgcattgagcctttcggagtgcatatctggaatgatgataaggcgggaactgtctttgtggaaacggaggtgaaaaattacggaaagactgctgagacggtggaagtggttaataaattcagtaatgcggatggcaagcaggtgttccgcctgacggagaaggtgactttgcagccgggtgaaaggaaggtggtgaagcaacaatcgccagtgcagaatcctgttttatggagtacggagaatccttatttgtataaactggccagtatgataaagcgtggtaagagtactacggatgagattagtacaccctttggtatccgtaccatcagttggccggtgaaacgggaggatggtgacggacggttctatctgaatggacagcctgtctttatcaatggagtgtgtgaatatgaacatcagttcggacaaagccatgctttcagccgtgagcaggtggcagcccgtgtgaaacagatccgtgcggcgggcttcaacgctttccgtgacgctcaccagccccatcacctggattatcagaaatattgggacaaggaaggagtcttgtggtggactcagttttcggcccacgtgtggtatgatactccggagtttcgtgagaatttcaagaaactactccgccagtgggtgaaagagcgtcgtaactcgcccagtgtggtgatgtggggattgcagaacgaaagcacgctgcctaaggagtttgccgaggagtgtagtgagattatccgggaaatggatcctacggcccgtaccatgcgtgtgattactacgtgtaatggtggtgatgggacagattggaatgttattcagaactggagtggaacttatggtggtgatgtgaataagtatggccgtgaattgtcacagaagaatcagttgttgaacggtgaatatggggcatggcgcagcatcggattgcatacggaaccggcagcttttgatgtgaatggtgtatggagcgaggagcgtatgtgccagctgatggaaaccaagatacgactggcggaacaggcaaaggacagtgtgtgcggacaattccaatggatattcagcagtcatgataatccgggacgccgccagccggatgaagcgtatcgccggatagataaggtgggaccatttaattataaaggattggtgactccgtgggaggagccgctggatgtatattatatgtatcgcgcgaactatgtgccggcttccgaagatccgatggtttatctggcatctcatacatgggaggaccgttttgcaacaggccgcagacgggctaccattgaggcgtacagcaattgtgacagtgtgttgctgtacaatgatgcggtggatgctgaatacttgggacggaaattgaatcatggggtggggactcatttcatgtgggaaaaccgcgatatccgttacaatgtgcttcgtgctgtggggtactttaaaggaaaaccggcagcggaagatgtgctggtgctgaacggtctggaaaaagctcctcattttgaggctctttaccgtggttctgctatagtgcctgttgctgccgaccggttgaacggaactgatttgttgaaaggagctgagggatatacgtatctttatcgtttgaattgcggaggagacgcttatacggatacgtatggtcaggtctgggcgcaggataacagccgttattctcattcgtgggcggaatcgtttgttcatccgtcggatagtgtacagttgttgagcccttatcaggcgagccagcgtaccacgaatgatcccattcatggcactagggactgggaactgttccagactttccgcttcggacgccataagctgaacttccgctttcccgttccggatggcgagtatcgtgtggaactttattttacagaaccctggcatggtacaggaggcggcgtacagacggattgtgaaggcttgcgtatttttgatgtagcggtaaatgataaagtacttctggacgacttggatgtatgggctgaagcgggtcatgacggcgcttgcaaaaaggtggtgaatgctatcgtgaaagggggagtcttgaagattaattttccggaggtgaaagcggggcaagctttgatttgtggcattgcgatagcttgtaaaggcgacttggattccgttcgctctttttctgcccatagcttcagctgggctgcacaagacaaggaggtgatggaaaagactcccaaagaattattgcctgaagataaaaacgcccgtgccaatgtgacttatcaagcggaggatgctgtgctgaaaggtaagttcataaagaaagaggttaagaaacaaaccggggttttctttggtaaaggtacacaaagcagtattacttggaacatttctaccggtctggcacaagtctatgctcttcgttttaaatacatgaatgttacagggaagcctatgaaggtgcgtatgcagttcattgattccaaaggggtggtactgaaggaagataatctgacttttgccgaaactcccggaaagtggcgtatgctgagtacaacgacgggtacgtatatcaatgcaggctattataaggtggtgctttccgcaccggatatggagggactggcattggatgcgctggatgtgcaataaagtatttttttatttgccggtaggaataaatagtttatctttgttcttttaaaaagtttgaattcgtcagaacagagtttatgccaaaatttataatagataagataggtccgatagagcatgttgattttactttgaataaagtgaacatgctgattggtccgcaaagcagtgggaaaagtacaatagctaaggttatcagtttctgtctatggttggaaaaggatgtgctgatgcgtcgtaacactgattatgtaagttggagctttgtggaaaaacagttgctagagtttcataaattgaaaaactatctgaatgaaggatatgctatattctttgtgggtgatgctattgatttttgttatacaaaagatatgtgcttcgctaaattaaaagacgggtttgaaaggtgcaaaattggcaaagtcgcttatatacccgctgaaagaaatgctgttacgttacccaatattgcgtcattgaagatgcctgaatataatacaagaagctttatttttgactggttggaagttcatcaaaagttccaaaagaaaaatgctgtcgatttgctgaaactgaaattgaagtattattatgacgaatcatcccaaaaggatatgattgtgctggaagatggaaaagaaataggattggaggaggcttccagcgggttgcagtcggttgtgccgttgtatgtttatgtatattatttgacccattggatatatgatcatcaggaagatatttcttttgaaaagaaagacagaatagaaggggcattgtccagggagtatattaaaatgttttccaaacaaatgaatgttgttatggatgaggaattcttgaatcaggcagtaaaagaagcaaagctttctccagggttcaaaaagatattaggaacagcaaagatcttgaaaaaagcgggtaatgattctttggataatttgttggaaaccgttttggaacttgaagagaatatttctcatcctcattactccaacattatagtggaagagccggagttgaatttgtttcccgaaactcaaaaagatcttatctatgatctgttggagatgatcaatagcggacgggatcatttactgatgactacccacagcccttatctgctttatgcactgaataattgcatgctgggggctttggtacaagaaaatataccggaagaagaggagggattacaaaagatgaaggattcgtttgtcaagccggaggatgtttctgtatgggagattaaaaatggaaaattttttccttataaagagaatccgaactatactattcaagatgaaagaggattgattcgcaataactattttgatcggataatgaagaatatcatgacagactttgctgccttaatggattattgtgatgaggattgaagcttttacaagatataatgagatgacaggtgacgcctatgtcatggattatacacaagcgacagccggtaaacggaaagtatgtataaaggaagaagatcctgatgatatagcttcttttcatttgattaatccaagaaaaacgacttattgggcagtgaattttgaggagaatccggctgtgttgaaaggttctgatcagtgtgaatgtatgtttgtttccagtagggcaagcagtaagggatgggtttgcttggttgaacttaaatattgtttggaaaagaacatagagaggaatgcaggagatgcttttaaacaattgtatgaaacattgaacaaattggtggaattgaatattgtagattataaatcacatcggatttacttaaatatatctatacctgaacattcccatagggcaccgtttactgcttttcagaatacccaagatgatttgttggaatgtttatatactcataaggttaaagtattgggatataatgaagttctgatattaaatgaatgttttatcagaccaccgaaagaggagatctgaaatctatatgtatcattaaatgggcgatctgaaaatataaaatggaatcataaggggaaggtttcagcatttggcattttttactatctttgtgctctgaaactaacctcttaaaaatatgttaattgatttactgcattcttcttatttctcgctctttcttattgtagcgttgggttttatgctagggaggattaagataaagggcttgtcgctggatgtgtcggccgttatcttcattgccttgcttttcggacatttcggtgtgatcattcctaaagaattggggaacttcggtttggtgctctttatctttaccatcggtattcaggccggtcccggattttttgattctttcaggagtaaaggaaagacactgattcttattactatgcttattatttgctctgcctgtctgacggcggtaggactgaagtatgcttttgacattgatacgcccagtgtggtgggattgatagcaggggcattgaccagtacgcctggtctggcggtagctatagacagtacaaattcaccgttggcttccattgcatacggtattgcttacccgtttggagtgataggggtgattttgtttgtgaagctgttacccaagattatgcgggtggatctggataaagaagcgcgcaggttggaactggaacggcgcagcggttttccggaactgacaacttgcattttcagagtgaccaatcaagcggtattcggacgtactttggcgcaaataaatgcgcgtgccatgacgggagccgttatttcgcgggtaaagcatgaggattctatattgatgcctaaagcgaataccatgttgctggaaggcgactatgtgcaggcggtgggaagtgaggaagcgctgaatcagtttgccgtattggttggagaacgggaggaaggcgaattgcctctggaccagacacaggagattgaatctttattgctgacaaagaaagatatgataaacaagcaattgggagatctgaatttacaacgtaactttggttgtacggtaacccgtatccgtcgaagcggcatagacttgtcaccttctccggatttggccttgaaattcggtgataagttgatggtggtcggtgaacgggaaggactcagaggcgttgctcgtttgttggggaataatgccaaacagttgtctgatactgatttcttcccgatagctatggggattgtattaggtgtattgttcggtaaaataaatatttcattttcagacagcgtttcattttcacccggattgaccggaggagtattgatggtggcattgttgctgagtgccgtgggaaagacaggacccatattgtggtctatgtccggtcctgccaatcagttgttacgtcagttgggcttattgctgtttttggctgaggtcggtacttctgccggtaagaatctggtggctacttttcaggagagcggattgttattgttcggagtgggggcggccattactgttgtgcctatgctggttgctgttgtggttggcaggttggtctttaaaatcagtttgttggatttgctgggcaccatcactggtggtatgaccagtacgcccggtcttgcggcagccgattccatggtagatagtaatattccgagtgttgcatacgctacggtgtatccgattgcaatggtgttccttattttgtttatacaagtgatcgcttcggcagtttattgatatatcaaacagccgggtgggtatgtgccaaaggtagtaaatacttttggcacattttttatttggatgaatgttgtatttttatttatcgatatgaggagaaaaaaatattcattttgtttcttttatagattttaatttatatatttgtcacaaccttaatataatacggagaaagattaggcttattcggtgacagaatgacgattggaatatgtatgaataagctgaactcatatatggtatttataaatatactcaattttatgaggaataaagacacacacactcgaattacagacaaatgcagatgtttgtttgtagttgcctattcggcaatgtctattacaggattgagctccgtgctcgcagtggaaaaccatgcactatcttctccggtttcagatcgtgtggaaagcgtacagcagaaaaaacatgtttcaggtaatgtgcaggatgctaacggaatgcctttaatcggggcgtccgtaattatcaagggaaccaataccggtatgattaccgatattgaaggtaatttcgctcttgatgctaaacagggtgatattatcgtaatcagttacatcggtatgaaatcggcggaggtgaaagtgcctgctaacgggcaaataagagtgatgctgaaggaggattctcagttgatggatgaagtggtagtgactggttatggtgattttaagaaggctacttatacggggtctgcttctgttttgaatacggataaattggagtcattgcctgttgtgtctgtagcacagatgatggaggctaatattccggggttaagttcagtagccagttcttcccagccgggttctaaagctacagtgcgggtgcgtggaattgcttctatgaatgcttctacagaacctctttatgtattggacggtgtgccggtagcgtctagggatatgagtggtctaagtgccaatgccagcgcgggaggacttggtttgatcgagacattaaatcctgcggatattgaaagtataaccgtattgaaagatgccgcttctgcttcattatatggagcaaaaggatctaacggtgtaatccttattactactaaaaaaggtaaggaaggtaaaatgagagtgagtatgcaggctacttacggtattacggatattgcttacaattatcgtccgataatgggtggtgaagagcgtagggaattgatttatgagggatttgttaattatcgtttgaatcagggggactcggaagccgaggcaaaggcttatgcggatggacaaattgacaattatgcggcacgcccggtcaacggatatgctgattgggaagatgctttattgaaaaaaggacatcagcaagactatagtttgtctgtaagcggaggtaatgaaaagtcgaattttattggtacgttaggatataccaatcagacaggtataagcataaattcaggaatggaacgttttaccggtcgtattgatgcaaacagtaaatggaataaatttgagtatggaatgaatgctaccttttcatggactcgtaataaacatacgccggagggacagtattatgccagtgcgctttattcttcaaaatatcaattgaccccttctatacctatttataatgaggatggcagctatcatacgggtttccagaataatggaggcattaacccgctgtatgagaattctgtagattcaaattatgcacgtctggcacgtacaatggcatctgccaaggctgcctatcatatcttggatgggttgaagttatctactatctttacagtagactattctttaaataaagactttttcttttactcgcctgacggtaaagatggggaagctacacagggatccggacagatgatgatgattgagagaatgagttatacttcacaaacgaatctggcatataataaaacgtttggtaaacataacattaatgcggtcttagcgtatgaggttatgaagtacgattatgaggatatgtatggtgagaaacaggtttacgggcaaacacttaatccgtcgttggataatggtgccaaacctgctgatcttactaatacaaggcaggaagatgctatggtgtcgtatgtgggaagcttgaattatggatataatgataaatattatgcaggtttcagtttccgtcgtgatggctcttcccgattggcacctgatacccgttggggaaacttttgggctgtttccgcttcatggagactctctcaggaaaacttcatgaaaccgtgggagaatgttgtgtcggatatgaaattaagagcatcgtatggtgtgaacggtaatctgccgaccggttattatggttatcatggaacttatactaccggagcattttataatgggaaacctgctccgtgggaagatgctattgctaatcctgatttgacttgggaaaagaactatgcattgaatctgggggttgatttaagtctgttcagacgggttaatttgactttcgattggtataccagaacgactaaggatttattgatgagtaagcaattaaattctattagtggttttggcagtattcttacgaatgtgggtgaaatgaaaaataccggttttgaaatagaagtacgctcaagtaatattcaaaccaaagattttagttggacaacttctttaaacttgtcacataataaaaataagattgtaaaactggcggatcttccggaatttatagatggaaattatatcagaaaggaaggctgttcgtatgcgacaatttatttgagagaatatgccggagtggatcctaatgacggacgcccgatgtattatgacaataaagaagacgaaaatggcaatagaagcaggaatattgtgtatgatcccaatgatgccgaccgtgtggagttgaaagatatatatcctaaattaaccggtggattgatgaatacgtttaattataagtttattgatttatcttttaatttgtcgtttcatttaggtggatattcttacgatggtgccatgtatgctttgcaagatgacggctatacggcacaatacaataagagtacagagttacgccgccgttggaaacagccgggagatataacagatgttccccgatatgtgtatggacaagagtatggtggctggtggaactcatcacgtggtattcatagtacagatcatttgcgcttgaaaagtttgattgttggcgtttctgctcctcagtcttggttaagaaccataggtattaattctgcccgtatttatttttcgggtaccaacttgttgacatgggctgcatacgatcaatatgatccggagttgaatggaattgtaagttattttactcctcctcttaaaacattcgcatttggacttgaacttaaattctaatcaattaacaccgaactgtttatgaaaaaaaatataattatattaggcttgatttctttattggccgtatcgtgcggggatgattttttaaccactcatcctggtgatagcgtttctacggatttggcactgagtacagagcaggatatagataatgctgtgaatggattgtatgatttgatgtccagctatggctattatggcggaaccatgtttttttatggggatatgaaaggggatgatatgcagagttcttataatagcggaagaacttgtaaccggtgttatttatatgatcatcgctctacaagcttaaatgccggatatttatggggacgtcctttttatattatccgtaatgcatggaatgtgatcaatgcgattgatgatggaaaagtgcaaggttcagagcaaagattaaaggaattaaaaggtgaggcgatgactatcatggcactttgccagtttgacttgacccgttgtttcggttatccttatactaaggataaaggggccggttggggagctccaattgtagatcatgcaattacattagatgaaaatccgccacgcagcactgtagcaaaggattatgagttcataatcaatacattggaggaggctatacctttaatgagtacttctaaaaataacagccggatgaatgcgtatgctgcaagagcattgttgtctcgtatttatctgtatcatgatgataacgagaaggcgtttcaaatggcaagcaacttgattgaagaagtggaaggaaatggaatgtaccgtctttatacacgtgatgaatatattccggcatgggatctgaaaaatacgtttggtacggaatcattatttgaaattgctaatagtacagatgataatggaggacgaagttcattggcatatctaatgcattggaatgggtatcgtgagatttttgctactcagaaatttgtggatgagttattgagtgatccggatgatattcgctgtctgttgctggaaaagaatgtttataataaaaatgatgtatggtggttgaaaaaatggccgggaacagatgctacgactccatcttttgaaaataattatgttattttccgtttgtctgaagtctatttgaatgcggcggaagccggagtgaaaataggtggggcatctgccgtaaagggtttgaattatctgaatgcaattgtgcagcgtgctaatcctgtaaaagaagtaacggcggctgaatatacattggatagggtgttggaagaaagaagtaaagaattgataggtgaggggcatcgtttctttgatatgttgagaaatggaaagaccattgttcgtaagggaggatatcatttaccgggtatcgtggaggaaatagactgggattattataaatgtgttttaccgattccaacagaccagtttacatttagtcctgatatggagcagaatccgggatatactaaaaattaattttaaataattattaaatgagagggtgtggtatcacaccctttttttgtgtggacaaattctacattcatgtggatttattctacagttttacagatgttctgtttgcttatttagttaatatacagtgatttgacgggcggttattgttgttggcatatcttttgaccggaacatgataaattattatataattatataaatataaatcatgaataaatctaggtatgtttttttcattttggcttgtttattcggtttgtacgtgcaagctcagaatagaacagtgaaaggacgtgttctctcagcagaggataaagaaccattaattggagctactgtcaaaatacccggtacatctatcggtgtggtgacagatatagatggcaatttctctctggaagttcccaacaaagacaaaacattagtgattgagtttttaggtatgagtacactaacggcgaagatacctgccaatggggtactgaatgtatctttacgtccggatacacaacgattggacgaggttgtggtgacaggctatggtaatttttccaaatcctcatttaccggttcggcaaatacattacggggggacttgttgaagaacgttccggttgtatcggtagaacagaagttgcagggtatgactccgggtgtgtccatttcgggaaattccggtcagccgggtgctaatcaaagtatacgtattcgcggtatggggtcattcaatgcatcgaaagaacctttgtttgtcattgacggagtaccggtgacttccggaagcttgagtggtggctcggcagatgccgcttacatgaataattctaaaacgaatataatgagtacgctgaacccttcggatattgaaaatataacagtcataaaggatgcggcggcggcttctttatatggttcacgtgcggcaaacggtgtgattctgataaccactaaaaaaggtacaaagggacgtgctaaggctacattaaaaattgatggtggcttttctaatgctgctgtggaattccgtccaacgttgaatggggagcagcgtagagagctaatttatgaaggtttgatgaactttcagcaagatgagatagccaagaatccggaggcgggattggcgtcgcccacagagtatgctgatttacatatcaatgattatgcctccattccggaactgggatatactgactggagaaaggaattaatgcgtacggcacatcatcaaagttatgaagcgtccgtatcgggaggtaatgacaagactacgttctattcttcattgggttttaaccgtcaggagggtttggtggaaaattctaatctagatagatatacagcgcgtttgaatgtaacccagaaggtaggttcccgtggggaagtgggtgccaatgtgatgttctctcaattgaatcaggaaatgaatgaggagcgtggatcatctattaatcctttcctttgtgtggctttgaacaccactccgtcttttccggtacgtgacgctgaagggaattatgtagggtcatatcccagtagcaatgtgaatccgttgcgtgatatccgtacagattataaccgtacccgcatgacacgtatgttttctacaggctatgcttcgatagatattatcaaagggttgaaattaaaagaaacgcttagctatgattataatattcagaaagattcccgttattggaatccgttgagtggagccggagctaaaagtggtagtgatgcacagacggcaaagggatttatagaatatagtaaattgatttcttccacccttaattccgcaacactattacaaatataactttttaagtacctgagcaacaaaaagttgctcaggaatttgccatgtcagatttttcacctatcttagtgttgcaaatcaaaatatgtatcaaacccgacagacatggcaaaggtagcaattaaatccgagaaactcactccttttggaggaatattttcaataatggagcaatttgactccagactctcatctgtaatcgactcaaccctcggtatgagatgcaggctgtatggttatcaatacagcgaaatcatccgttcgcttatgagcgtttatttttgtggcggctcatgcatcgaggatgtcaccactcatctgatgtaccacctttcgcttcatccgacacttcgcacatgcagtgccgacacgattcttagagccataaaggaactgacccaggataacatttcctacacatccgacactggcaagacctacgacttcaacacggcagacaagctgaatacactgctcctcaattgcctattgtccacagggcagctgaaagagggcgaggggtatgacgttgacttcgaccaccagttcatagaggctgagaagtttgatgcgaagcctacatacaagaagttccttggttatcgccctggcgtggcggttattggcaacttgattgtcggcattgagaacagcgacggcaacacaaatgtccgtttccaccagaaggacacgctgaagaggttctttgaaaggtttgaacaaaacaagcttattatcaaccgtttcagagctgattgcggctcgtgttctgaagagatagtggaagagattgctaaacactgcaagaccttctatatccgtgctaaccgatgcagttcgctctacaatgacatctttgccctcagaggttggaagaaagtggaattgggcggcattgagtttgagctggcctccattctcatcgagaaatggaaagggaaggcataccgtcttgtgattcaaagacagaagcggatagacggcgaactcgacctgtgggaaggagaatacacctaccgctgcatccttacaaatgactacgagtcttccgagaaagagattgtcgaattctataacctccgtggagggaaggaacgcatcttcgatgatatgaataacggattcggctggaacaggcttccaaaatcctttatgggagaaaacacggtgtttcttctgcttatggcactcatacgcaacttctataaattcatcatggcgaggcttgacgtgaagaggttcggactcaaagcaacaagccgcatcaagacgtttgtctttaagttcatctctgtgccagccaaatgggtcaggacatcaaggaagtatgtgctgaatatctattcatgcaacaatgcttatgccaatgtgttccagaatgactttggataacaccgacaacttatagtcgtgattttgcgtattgcctcaagtcgcatggtggggtaaggggcatttatatgtctttatggtgacattcgatgcactgtgccccctttttactaacgatgcagattcttttcgcttctgtatcatattaggcgcgtagttgcggatttgaggtccacttcattgggatacaatacgactatagcacagttgcaccatgtggacgcattgatagcttatgaaattgaaaattatcagactgacaaagcaatgggggataaatccaaacttccttcagattatttggtggaaccggataatgcagcatcattgaacagctttgtgtcttctactcaggattcaagaatgatttcttatgtatcccgtatcaactatgattatgatgaccgttactatattgctggtagctttcgtcgtgacggcagttcacgcctgtcacccgagaaccgttggggaaatttttggtctgtatccggtatgtggaatgtaggtgcggaaaaatttatgcaatctataaagagtgtgctgagtgatttaaagatacgtgcctcgtatggtgtgaatggtaatcaaccgggtgctctttacggatatatgggactttattcctacgggcagaattatatgggaggtggtggatcttatgaatcggcattaccgaacccgaaccttaaatgggaaaagaactataacttgaatttgggactcgacctggcatttatcaatcgtatttttgtcagcttggaatattataatcgcgatacgaaagatttgctttacaatcgtcctatcagtagcactaccggtttccaaaattatttggggaacttgggacaactgaataatagaggttgggaactggaactgcgtaccataaactttgccggtagcaactttaattggacttctgttttgaatatgacccacaataaaaataagattgtatcattggatggtaaattggaacagtctatcgagggaagctggtttatccataaagtggggttgccgtattctaccttctatgtgaaagaatatgcgggggttgatcctcaaacaggaaaagctttgtactatatgaatacacaggatgcaaatggcaattatgacaaaacagttactactgacgcttctgcagcacaggcaattccttataagtctgtggatccgaaaatttcaggaggttttaccaatatcgtgaattacaaatggtttgatttagcattgacattgacttattctttaggaggatattcttttgacaaaaccggaacttataatgaaaccgacggtgcaaaagagcagaactataacttgcccatttatgaattggatcgttggcaaaagccgggtgatgtgacagatgtaccccgatttgtacttggccaagcagcaggaccgcagaattcatcccgttatgtacatagcacggatcatttacgtgtaaagaacttgactttgggctttacattgccagatcagtggttgaccaaactgggtgtcagtaaagcaagattgtatttctcaggcagtaacttgttgacgtgggcaaagtgggaccagtatgatccggaagtgcctgtttccggtgaagtattttgtgaaacacctcctatgcgtacttacagttttggaatagaagtctctttttaatgaatttcctttaaattagaacgaaatgaaaaaaatatatttatcgattgttgcggctgtatcattgatgtttgtttcgtgtactgctgattggctgaatacagatccttctacggcagttcctagtgatgatgccattaaaaatatagatgatgcacaggtggcattgaatggtatataccgattagcatccgcacatagttattatggtgataattatctttattatgctgattgtcgtggagaagatgtgcaggcacgtattaataaaggagcaggccgcagggtttctccttactatttctttgatgttacggcggatgataattttaatataacccttgtctggaaccaaccctataaagtgatccatcaggctaacagtctgatagaaaagttggatgcggggaatgcggggaatgccaagccggaagaagtggcacggattaaatcggaggcactggcaatgagaggactggctttatttgatctgacccgtttatttggtatgccttatactttggataatggggcttctttgggagttcctattgagattcagaccaccttggaggatcatgctccggaacgtaacacagtggcacaatgttacgaacaagtgctaaaggacttgaacgatgcgttgggaggactgacaaaagaaaaacatgatgcctatatgaattattggagtgtgaaagctttactttcccgggtgtatctgtatatgaatgacaatgaaaatgcattgaaatgtgcagaagaagtaatcaatgacaatgggggaatttaccggctttttactcatgatgaatatccttctgtatggggaaaagacttcaactcagagtctttgtttgaattctattttacgatgtctgaaccttcaggcggttcgggaggagaaggggcgccgatggtgtatgccgataatgtgaaagattggaataacctgattctgacaaaggcttatttggatttgctgaatgaagaccctgaagatgtgcgccatgtatttcctcatttgccggaaaatgcagttgcagatacattgcccgtagctgccaaaggtcaaccgaaatatctgattaaatatccggggaaatcgggcagtgtgaccgatgctgtttctacagtcaatccacaggataatgatctttgtattctccgtttatccgaggtctatttgaatgctgcggaagctgcttttaaaatcggcaatacggaaaaagcattgacatatctgaatgcgatagttacccgtgccaatccagcgaaatccgtaacatctgctgatctcagcttggagcgcattttgaaagaaagacgtaaagaactggtaggtgaaggtcatgctttctttgattatatgcgtaatggcaagtcagtggaccgttcaggaggctggcatctgactatgcctgaagatgctcgtgtcattactccttcagaccctagggtggcacttcctattccacaaactgaaattgatgctaatccgaatatagttcaaaatcctagataattgttttgtccatgttaagtttgcccttcttttcgatgatgatatcggagagaagggttttctttttacaatttatatggtacaaaatcatatttcgtccgtcttcatttgaaaagaaagagcaaaaatatgagaatatatggattgttactgtgcggatggatggcggtatccttacaggcccaacaaatacatgattgggagaatcatcatgtattacagattaatcgggaaccggcaagggctgcttttgtgccttttgccaagcagaagggggattgttcgatgagtctggacgggatgtggaaattccggtggactcctgtgccttccgaacggatagcggatttctaccgtacggactttaatgacgaggattggaaaagttttccggttcctgccaattgggaaatcaacggatacggaacacctatttatgtatcggcaggatatccgtttaaaatagatcctccacgggtaatgggggagcctaaagcttcgtataccacctacaaggaacgtaatccggtgggacaataccggcgtacttttattttaccggctgggtggaaagcggatgggcagacttttcttcgttttgaaggagtgatgagcgctttttatgtatggataaacggtgaacgtatagggtatagccagggaagtatggaacctagtgagttcaatatcacccgttggttgaaaccgggagagaaccaaatagctttagaggtttatcggtatagtgacggatcttatttggaagatcaggatttttggcgttttggaggtattcatcgcagtattcatttggtgcatactccagatatccgtatccgtgactatgtagtgcgtaccctccctgctgttcaggggaattatcaagatttcagactgctgattgatccgcagttcagcgtttatcagggaatggacggtaaaggctatacgttgcaggcagtgctgaaggatgcggatggaagagaaatagtgaatatggttggcaatgtggaagatatcttggatttggagcataaggcggcacggatgaatgaatggtatccgcaacgtggtccacgtaagatgggacgtatgtccgccgttataaaatctccacaacgttggacagccgaaactccttatttatataagttggagcttcgtttacagaatgtaaacggacagaccatagagcaagtggaacagccggtaggttttcgttgtattgaaataaaagacggacaaatgttggttaacggtaattctgtccgctttcgtggggtaaaccgtcatgaacacgatccgtatacggcacgcgtgatgagtgaggagagaatgttgcaggatatattattgatgaaacaagccaatgtgaatgcagtccgtaccagtcactatcccaatgtgagccgttggtacgaactgtgtgacagcttgggactgtatgtgatggatgaggcggatatagaagagcacggattgcgtggaacattggccagtacacccgattggtacgccgcttttctggatcgtgcggtacgtatggcggaacgcgataaaaatcatccttcggtagtgatgtggagcatgggaaatgaaagtggttacggacctaattttgctgctatttcggcttggctacatgattttgatcctacacgtcccgtacactatgaaggagctcagggagtgaacggagaacccgatccgaaaacggtggatgtaatcagccgtttctatacccgtgtgaaacaggagtatctgaatcccggcattcccgaaggggaagacaaggaacgggcggagaacgcacgttgggaacgcctgttggaaatagcggaacgcacgaatgataaccgtcctgtgatgaccagcgaatatgcacattgcatgggaaatgctttaggtaatttcaaggaatattgggatgagatttatagtaactcacgtatgctgggcggctttatatgggactgggtggatcaaggtatttataagatattgccggatggcagccagatggtggcgtatggcggtgattttggtgatcagcctaatttaaaggctttttgttttaatggtgtggtgatgagtgaccgcgaagctacgcccaaatattgggaggtgaagaaagtatatgccccggttaaattggaaatggaaaaagatcttcaggtttttccaaaagaacaagatcttttagtaaaagaacaagatgttttgcccaaaggattaagagttacgaaccgcaatcaccacattggtctggaaggatatcgctgtctgtggactttgatagagaatgggaagaagatggaacaaggggaactggcgcttccattggtggcacccggtgaaacgggaacgatggctttgcccgatgtcaagattaataagcaggctgatgttcgattgaatgtaagtatagtattgaaagaagatgctttatgggcgaaagccgggcatgagattttaaaggaacagtttgccttgaatgatcatttgatggcggtggctaacggtgtacaaccgggtaaacgtaaaaataagttttctgttttggatttatggaaagatagttattttcaggctttccgtgctccgacggataatgataaaagtttcggtaactggttggccaaggattggaagaatcagagattggatgctcctcaagtagaggtgattactcccgaaacggaaactcaggaaacgaatggcaccgtatcgaggaaatcggttgtgaaatatcgttatgccaaaggtagcatccgtgtctcttcccattataaaatatatgtggatggaacggtggatttggaacagacttatctgccacaaggagaattgccggaattgcctcgtctgggtagtgcatttgtattgggagaagaatacgagaatctttcctggtacggtcgtggcccgtgggaaaattatcccgaccgtaagacgtcctgtctgataggcagatggagcagcaaggtgagcagtcaatatacacattacccccgtcctcaggacagtggcaatcacgaggatgtcacagaggtgacccttaccaataaagaagggaaaggtatccgtgtgacagccatagaccggccattttcattttcggccttatattatactgtggatgatatttataaagcaactcatgattgtgacttgaaaccacgaaaggagattattctcagcctggatgctgcggttttaggtttaggaaacagtagttgtggtccgggagtgctgaagaagtatgccattgataagcagaaacctcatactttgcgggtacgtttcagtcttattaaatgacatatggcaaaaggtgtgaatgagcgacacatcttttcgggaagcagtcggaaaaatagaattaaattaaaaatcaaatatcaaaatgaaaagaacaacaacttttttatcactccttgctttatcggcaggtttgttggcgcaatcttccgtaaaaacagaacgccaatacttgtcaggacgtggctgtgatgatatggtacaatgggatttcatgtgtaccggtggtaataattccggaaaatggacgaaaatcggagtaccttcttgttgggagctgcaaggattcggtacttatcagtatggcatgaaattttatggtaaggcttttcctgaaggagtagctgatgaacaaggtttgtataaatatgaatttgagttgcctgccgaatggaatggtaaacagatagagctggtatttgaaggctctatgactgatacgcaggtaaagataaatggtcgtaaagctggctccatgcatcagggagctttttaccgctttatttataatgtgagtgaccgggtattcttcggatcgaaaaaaaagaatgtacttgaagtaactgtaagcaaggaaagtgcgaatgcaggggttaatttggcagaacgccgtgctgattattggaatttcggaggtattttccgtcctgtgtttatcgtggcgaaaccagctcaaaatatcgatcgtctggcaatagatgcgaaggcggatgggaatttctatgctgattgttttctgaatatggcagtagaaggtgctagggtacatactgtcataacagatgttaaagggaaaaaagtggccgaaaatacttcggatgtccgtacaggtagcgatcatgcttcgattaatttcactgtaaaatctcctgaattatggacagctgaaactccgactatgtatcaggctacgtttactttgcttgataaagccggtaaaaccctgcatgttgaaaatcagaaatttggtttccgtacgattgagacacgtgaaagtgacggattgtatatcaatggtcagcgtgtgatgattaaaggagtgaaccggcatagcttccgtcctgaaagcggacgtacactgagcaaggcaaagaatattgaagatgtattgcttatcaaaagcatgaacatgaatgctgttcgtctaagtcattatcctgctgatcccgaattctttgaagcttgtgactctttgggactttatgtaatggatgaattgagtggctggcatggcaagcacgaaactatcaacgggcagaagctggtaaaagaaatgattacccgtgatgtaaaccatccgtgtattatctggtggagcaatggtaatgaaaaaggctggaatactgaattggatggtgaatttcataaatatgatcctcagaaacgtccggtgcttcatccgcaaggcaacttcagcggatatgaaactatgcactatcgttcttatggagaaagccagaactatatgcgtctgccagaaatatttatgccgaccgaattcttgcacgggttgtatgatgggggtcatggagcaggattgtatgattattgggaaatgatgcgtaaacatcctcgttgtgccggaggttttctttgggtgctggctgacgagggcgtgaagcgtgtggatatgaatggattcattgacaactgcggcaattatggagctgatggtattgtaggaccgcaccacgaaaaagagggaagttattttaccatcaagcaggtgtggtgtcctattcaaatcagggttgatagccttgacagtcagtttgacggcaaactgagaatagagaaccggtacgattttttgaatgcgaatacttgccgtttcacctataaatatgtacaattgccttctgtgaccgataggggggggatgaaagtgatgaaacagggagaggtgaactgtcccgacattcctgctcacggtgtgggtacactgactattcctgcggctatgaagggagccaatgctctactgctgaccgttacggataaaaatgggaatgacctttttacatggagctataaactggaagacattgccggattgcaacaggtttctgccggaaacaagccttcttataaagaaactgccgatgcattgacggttgatgctggaggacgtacatttactttctctcagaaagacggacaactgaaaggggtgaagattggaagccgtaccatcagcctgacaaatggacctcgttttattgctgcgaagcgttcggaccgttctatggaccagttttacaaccatgatgacaaagaggctgaaaagaagaaaacccaatatacaacatttgaggatgctggttgtttcacgggctttagcgtgcgtgaagaaggcaataacgtagtagttaccgctaactacaaactgggatgttttgatcaggctgtatggactatctcccctgacggtaccgctgctatagactttacatacaactttagtggtgttgtggatttgatgggggtgatgtttgattatccggaagataaagtgttgagcaagcgttgggtaggtgacggcccttaccgtgtatggcagaaccgtctgcatggcccgcagttgggcgtatgggaaaatgagtataatgatcccattcctgctgaaagttttacttatcccgaatttaaagggtacttcgctaatgtgcaatggatgactttggaaacacaggaaggaatgataagtatttgtaaccgtactcctcagaattatgtaggggtttatcagcctcgcgacggtcgtgacggcttgctttatacttttcctgttaccggtatcagtctgatgaaagtaattcctccggttcgtaataaagtgaatacgacagatttgataggtccgtcttcacaagcattttgggctgatggagaatatggaggaggtatcacgttaaaatttgaataacagtgaaaaaatagattgtaaagggaagagaaactttgtttattcttcccttttctttttttatttgacttgaactctctatatttgagaaattgagtacaaattacaactttgttcgtttattattaaatatagaataaataacttatgaagataaaacatctgtttgtatccatattgctggtaaccggattccaaccgatgatagcacaatccgctttacggcaacagtttgtaaattcacccgtacaggaagctcgtccttggactttctggtattggatgtttggcgctgtaactcccgaagggattactgcagatttggaggccatgcatcgtataggtttgggtggggcctatctgatgcctattaagggagtagagcaaggacctcaatacgagggaaaagcccagcaacttacccctgaatggtggcgtatggtctctcatagtatgagagaggctgataggctaggcatgcagttgggaatgcatatctgtgatggctttgccttggcgggaggtccttggataacttccgaagagtcgatgcaaaaagtggtatggagtgatactatagtgaacggtgggaatattcgtaatttgactttgcccatgcccgaagcactggatggctattatgaagatatcgttacctacgccattccattggagcgtcagcctgaggatacttcattgaagccgaaggtaactttcggcaatttgaaatcggccgttattaaagatgaatccaaagctgtgaacagagatgaaaaaggagttttccgttcctcttatccttgttggattcagtatgaatatgcagaacctgtgacttgcagtaatgtggaaattattttgggaggaaataactaccaggcacatcgcctgaaagtattggccagtgaggatggacggacattcaaaacagtgaagcaactggttcctgcccggcagggatggcagaatacggatttccagtccactcatgctatccctcctgttaccgcccgttacttccgttttgagtggactcccgtgggaagtgaaccgggtagtgaagatttggatgcagccaaatggaaaccgaatttgaaaatcaatgatatagtccttcatacggctccacgtattcatcaatgggagggaaaagcaggactggtgtggcgtgtagctactgctactacttcgacggaaatacctgatgcggcatgtgtgcagccggatgaattgatcaatctccctttgtatcagggcaggctgaccgcccgtttacccgaaggtaaatggcgtattctccgcatgggacatacggcaaccggacatgtaaatgctactgccggaggtggtaaaggattggaatgcgacaagttcagtaccaaggctgttcagaaacagttctcgaactggtttgcggaaatgttcaaaaagacggatgaagccgtggcacgccgtgtgttgaaatatatgcacgtagacagttgggagtgtggcagtcagaactggagtgataacttcgcggcggaatttaagaaacgtcgtggatatgatttgatgccttatcttcctttgctggcaggtattccgatggaaagcgccgctcgcagtgagcagatattgcgggatgtccgtaccaccatcggagaactggtgactgatgtgttctacaccgtattggctgattgtgcccgtcaatatgattgtcgtttttctgccgagtgcgtagctcctactatggtcagtgacggattgatgcattatcagaaagtggatttgcctatgggggaattttggttgaacagtcctacgcatgataaacccaatgatatgctggatgccatcagcggtgcgcatatttatggaaagaatattatccaggccgaaggctttactgaaattcgtggcgtatgggatgaagaccctgccatgctgaaacctttgctggaccgtaactatgcactgggtattaataagctcttttttcatgtctatacccataatccctggatgaaccaccggcctggtatgacattggacggcatcggactcttcttccagcgcgaccagacctggtgggaggaaggaaaatcttttgtagattacatcacccgttgccagactttgttgcaatacggtcatccggtggctgatatcgccgtctttaccggtgaagaaatgccacgacgttccattttacccgaacggttagtttcgatgcttcccggtatctatggagccgaacgggtggaaagcgaacggattcggctggctaatgaaggtcaacctacccgtgtgcgtcctgtcggtgttacccattcggcaaacatggccgatcccgaagactgggtgaacccgatgcgtggctatgcctacgattctttcaacaaagatgctctgttacgtttggcaaaagcggagaatggaagaatggtacttccgggaggagcttcttataaagtattggtgcttcctacagcccgtcctatgaatcctgataacctgccgttgtctcctgaggcacaggcaaaagtagaggaactccgtgtggcaggtgtcattattccgaaattgccttatcgggaagatgatttttcttctttcggtgtggaacgggatgtacttcttcctgctgatgtggcatatactcatcggagtggggaagagtatgagatttattttgtagccaatcaggtggacagtttgcgtacattcaatgcttctttccgcattgcgggacgcacgcctgaattgtggaatgcggtaacaggaaccataactcgtccagcacaatggaaagaagcgaacggtcgtaccgaagtcgctttgtctttgcctgccaatggatctgtatttgtagtattccccaaagaatattcagaagtttctccggaacggaccgaaagggaacctgtatccatattgatcaaggaatggacagtaacattcccctctgtgcgtaagactgtcactcgtccggcattatttgactggagtaaggaagaggatgaaaaaataagatattatgccggacatgctacttacagagggttattcagatggaagaatgaacaggacggaagaatcattcttcgcttgggaaaagtggccaatgtggcgactgtacgtgtcaacagcattgcatgcggtacagcttggacagctccctatgaagtggatattaccgatgcgcttcgtaacggaaccaatgtattggaagtggaggtagtgaatacttgggcgaatgcgctccgtggggctgatttggataaagcgccttttgaggggatatggacgaatgcaaaattccgtctgcccggagatgatttgttgcctgccggatggatgggaccttgcgagttttttaaaactaaagaataatggtaatcacacataatatgaaaaataagaaactactactgggaattgcttgggcatggttgatttgcctgtcggcaaatgcggaagtgaaattgcccgctttcttttcagatggcatggtgatgcagcagcagactcgtgccaatttatggggaacagctacttccaatgcatcggtgaaaattacaacaagttgggataaacaaacctataaaattactgccgatgcaaaaggcgcgtggaaacttgctttatccactccctctgccggaggtccttacacgattacttttgatgatggaaagttgactgaaatacgtgatatcctgatgggggaattatggttatgctccggtcaaagtaatatggaaatgcccatgaaaggttttaaaaaccagccggtggagaatagcaatacagatgtgatgaacagccgtaatccgcaactccgcctgttcaccgtaaagcgggcttcctcttttactccgaaaacagatgtggtaggaacctggcaggaagctgttccggcaaccgtgcgtgaatttagtgctactgcttattacttcggtcggatgatacaacagcagttgaatatacctgtgggtttgattgtggcttcttggggaggctctgcctgtgaagcctggatgcatccggattggttgaaggcatttcccgaagcaaagattccccaatcggaagccgatatcaagtcaaagaaccgtactccgactgtactctataacggtatgcttcatccgctcatcggattagccatgcgtggagttatctggtatcagggggaagataactataaccgggcttctacttatgccgatatgttcagtgcactgatacgcgggtggcgcgaagaatggcagcaaggggaatttcccttctattattgtcaaattgcaccttatgattatggaattattactgagcctggcaagaatgtgataaattctgcttatcttcgtgaacaacaagctatggtagaacaccgggtgggcaatagtggtatggctgtattgttggacgcaggaatgaaaacggggattcatccgggtaaaaagagggtagcaggagaacgtctggggcgtttggcattagtaaaaacttacggaatgaaaggcgttacggccgaaagtccttactatacaggaatggaagtaaagaatgatacggtaatagtcagttttgatcgggcgccgatgtggataaattgtaaagaccgttttgaatcatataactttcaggttgcaggcaaagatcgggttttttatcctgctaaagcgtggatacagagaagtaaaatgcttgtaaagagcgaaagagtacctcatccggtggcagttcgttatggtttcgaaaattatgtggaaggagatttgtttggtgaagatttacctgtgtcgtctttccgttccgatgactggtaaaaacagaaaaaaatgaagaatatctttacgtttttattattagtatttattggcgggcagtttctgtggggacagcctgccaatttggtttggaatactcaaagccggaatgcttcggagtccatgccttgcggaggtggggatatcggtatgaatgtatgggtagagaatgatgatgttctgttctaccttagtcgtagcggttcttttgacgagaataactgtctgttgaagcagggacggtttcgtgtgaggctcactccgaacccttttgccggaacggcttcttttcggcagactctgcatcttaatgatggttatgtcagcgtaagtagtgataatgctactcttattatttgggtggatgtgtttcatcctgtggtacatgttgaggtgaagacgaaggaactgacttctatgcgtgtaaactttgaaagctggcgttatgaagatcgtccggtgcgtaaaggggaagggcagcaatgctcttacaaatgggccattcctgatggattgatgactaagcgtgactctgtctgtgtggaagaagataattttactttctttcatcggaatcctgatcggactatttttgatgtggtagtagaccaacaaggtatgaatgaggttaaggaacaattatataatcctctgaaaaatctaatatttggcggtcggttatccggtgataatctggtttataccggtacacgtcgtgggcattatgcgggaactgaatatctggcatggatgtataaaagtaaaaaacctgtatataagcaatctgtgcacattgccttgaatacggaacaaggtacggttcctgcatgggaagcatcattggcccgtactgagaaggaaataaatgtatccaaagacaaacaggctacccgtcgttggtggaatgatttttggaaacgtagctttattgagggggaaggtgaagcgggagatgctatccgtaactatacactgttccgctatatgttgggatgtaacgcctatagccagtggcctacaaagtttaacgggggactgtttacttttgatcctatgtatgtggatcagataatggaattcacccctgatttccggaaatggggaggaggaaccatgactgcacagaatcagcgtttggtttattggcctatgttgaaaagcggtgactttgacttgatgaaatcacaatttgacttttatctgcgtttgttgccgacagccgaagcgcgtactcgtgcctattggggacatgctggcgcttgtttcactgagcaaatggagaactttggtcttcctaaccctgcagagtatggttttaagcgtcctgcgagttttgataaaggcttggaatataatgcatggttagaatacgaatgggataccgttcttgagttctgtcagatgatattggaaacagcacgttatgacagtttggatatcagctgttatactcctttaatagaaagttcgcttagtttctttgatgaacattatcgtcagcttgcgttacaacgtggccgtaaggatttggatggtagcggtaaactagtgatttatccaggatcggcttgtgaaacttataagatggcctacaatccatcctcaaccattgctgcactgcgctctgttttacaaacttataggcgtaaaccggatatgctggcacgtattcctgagattcctttgcgcatagtggatgggaaggaaatgattgctccggcacaggtttgggaacgggtgaataatattgaaacccctcaactttatcccgtgtttccctggcgtatttacggagtgggcagggaaggtctggaaatagctcgtaatacctatttatatgatcctgatgcccagaaattccgttcccataccgggtggaagcaagataatatttgggcagcctgtctgggaatgacagaggaggctgcacaacttaccttagagaaaatggcaaacggccctcatcgttttcccgctttttggggaccaggctatgactggacgcctgatcataactggggaggcagtggcatgataggtatgcaggaaatgctgttgcaggaagccgatggaaagattttattgtttcctgcgtggccaaaagattggaatgtgcatttcaaattgcatgctacagggcaaaccactgtagaagctactctgaaagagggtgcagtggttagcttgaccgtacaacctaaagaacgggaaaaagatgtggtaaattgtttactgaataaataatttagggttaaggagatgagtttcttttagattcatctcctttttctttaaatataatcaaattcagaacttgtcactcctttcgtttttccattcttgtttatttgtatggcaatcagtgtcggaacattgtttgacggctttgattgcctttgttgcgtaaaacaagaaccaaaatatccgatgttttgttcttaatatcataaatagattcaaaatggttatgaaaaagattttaatagctttggccttgttgctgactggcattgcaagcggatcggcatgtaccggtatttcgttcctggccgaagatggtggatatgtgcaggcacgtaccatagagtgggggaatagttaccttccgagtgagtatgttgttgttcccagaggacaagaattggtatcttatactccaacgggtgtaaatggcttgagatttcgggctaaatatggtatggtaggactggctatcattcagaaagactttgtggctgaaggactgaatgaagtaggactttcggctggattgttttattttcctcattatgggaagtatgaagaatatgatgaggctcaaaatgcaactactttgtcggatttgcaggtggtgaactggatgctttcccagtttgctactatagacgaagtgaaagcagctatagaaggggtgaaggtggtgtctcttgataaacctggtaaaagttctacggtacattggcgcattggcgatgctaaaggaaatcaagtggtattggagtttgtggatggtgttcctcatttttatgaaaacagggtaggagtactcaccaattctcccgattttccatggcaggtgactaacttgaataattatgtaaatttgtatccgggggctgtcactccacagcaatggggtggggtgactattttcccttttggcgcaggtgctggattccatggcattccgggggatgtgactcctccatcccgttttgttcgtgtagcgttttataaggcaacagcttcggcgtgccctacagcgtatgacgctatattacaaagttttcatattctgaataattttgatattcctgtcggtatagaacatgcgtcaggaaaagcacctgatattcccagtgctacacaatggacttcggctattgatttgacaaacaggaaagtgtattataaaacggcatataataacaatattcgttgtattaatatgaagaagattgattttgataaagtgaaatatcagtcgtatccattggataaggagttgaaacaacctatagaagagattattgtgaaatagtgtggggggggaagctgttgacggaagtacatggaaattttaatcgcaatgaatgaaaaatggataaaatgtatttttttagaaaaaagttctagaaatgtttgcaaatacaaaaataaaccatacctttgcactcgcaattcggaagaatagcaataacaaaggattgattcgctagctcagcaggtagagcacaacacttttaatgttggggtcttgggttcgagccccaagcggatcaccaaaagaaaagccaaaaggcgacaacaaaaagacaagtcctacaaaatcaacattttgtgggactttttttattgccttttggctaccttgaccgccacgaaaaggtcactgacggacaaaaattagtgtcttatccgtacccccgacaaaattcttcaaaaaggggtacgaattggcggaaattggcgaaatgttgtcgggaattggcgaccctgcatttatctcattatgagttaataaaagtatttttgtaacttaaaaaatgaggtatgaaatcaacattccgagtattgttcttcttgaaaagggacaaggttaaaaagaacggtaatatgcctatcatggcacgtgttaccattgacgggaaattagcccagtttaacaccaaactggaggtcaatccaaagaactggtctgccaagaccggaaaggtaaatggcagaggggcggaatttactcgtatgaatgaaatgctggatagcatcaaggctaccttgtacagacactatcagaccattttagagcgggacaattatgtgaccgcagagaaagtacgcaacgtgttcttaggtaaggaagaaaaggcaaagacactcttacaggtattttcccaacataatgaacagtacgcattgaaagtcgggaaaacagccacgcaaaagacatacacccgttacgagcttactaaaaatcgccttgccgaatatatccacaataaatataatgtagaggatataacctttcgggaaataaatgtcgtgttcattgagggcttctacctgttcatccgtgagaattacccgtgtacccacaatacagccatgaagtttatccagcgtttcaggactgttgtcctgtttgctcataacttgggactgattacctttaatccattcggggcgtataagctgaaatttgaatatgtggaacgggattttcttgaacaagcggaattagaccggatatatcaaaagacgttcgccagcaaacgactggaacaggttcgggatatattcatatttagctgctatacagggctttcctatgttgatgtctgcgaattgacacctgaaaacataagactttcctttgacggcaatttgtggattatcaagaaaagacataagacaagcgtaacgtccaacatccgattgttggatatacccaaatccattttgcagaaatatgacgggaaactgcccaatggtaaactgttgccagttatcagcaatcagaagatgaatgattacttgaaagagattgcgaccgtttgcgggataaataagaaaatcacgtttcatacggcccgccacagctttgcgacccttagtataagctacggtgtacccattgaaagcgtttccaagatgttgggacacaccaacataagaactacccaaatctacgcaaaaatcatagacaccaaacttagcgaggatatggatatttttgctaataagctaaagaacagaaaaatataagtggtatagatattaacttaaaagtaatgattatggacttgcagattatccaaaacaagatttttgaggtacggggttgccgggtgatgctcgattaccatttggcagaactctaccaagtggaaacacgagccttgaagcaggcagtcaaacgcaatatcgagcgttttcccagtgattttatgtttgttctctccaaagatgaagctaacttactgttatccataggggtatcacaaaatgtgataccccctgcttacaacttcggcgttgctatgcctatggcttttacggaacagggcgtagccatgctgtcctctgttctccgttccaaagtagccatagaggtaaacatttcaatcatgcgggcttttgtccttatgcgccaaatggcaatcggttacgaggaactgttaaagcgcatcgaggaattggaggtaagcaccgatgcgcagttcaacgaactgtaccaagcccttacccagcttttgagccagtcgaaacaacagaaagaacgccgtccggtaggtttcgtttcctataaccgtgacaaaaacgaataggtaacgatttcggtaacgaaattccacctaacaagctatatcccaataaagtacattctttcaccttgcgggcagtccaccgactacccgcatttttattcccttttccactggcacattccccgaaacgccagccgtgcgtggcatggctgactgtattttgtgaaaagagccgttggaaacccgcacaagcgtaccgcaaggtgaacttgccatacccttgcctttcccgcccgcatggagtgttccctaaaggatgaaagggaacaagcacttttcccctgtttccctatctgtaaatcttcctcattatgcagtcccccagccgggacagtcgtttttatcatttcaataggcaaaggtagttacgtgttcttcacgactttgcaaggtcgagccgtttcggtttggcgaaaaaatcttccctgccttgcgaggtattttttgcccaaaaccttgcaaactctaaacactacccttttgagcctatgtgaaacgcaaacgaccggaagacgcataaaaaaaaaagtcggatttacgggaaacaggaaaaaagttcagtgaaacttcaactccctcacctctcgaatccgcataaaattaaaaacttaaaaattacagcaatatggaagcaaaggtattatcggaagcaaaagtttatgtaggcacttacggcaagtataacaacggttcattgtccggcgcatggctcgacctttcggactattcggacaaggaagaattttacgaagcctgccgggaacttcacaaggacgaggaagatgtggaatatatgtttcaggattacgagaatatcccggaagccctgatttccgaaagctggatttctgaaaacttcttttccctgcgtgatgcggtagaggatttggatgacaccgagcaggaagcctttttcgtgtggtgcaactacaaaagccatgatttgagcgaggaagatgcggacgaccttatacgtgatttccgggacgagtatcggggacaatatgacgatgaagaagatttcgcctatgaaattatcgaggaatgttacgacctgccggagttcgcaaagacctatttcgattatgaaaagttcgcccgtgacctgtttatgtgcgattactagtttgatgacggttttgtgttccgtgcggcataacaaccaattcgggcggggtgtcaaagccctgcccgctaaaaacaaccaagcgatgaaacgtaaaagcatttataaaatcctttggcgggtgttgctgttctgccttgcatggcggttcaccagcgtagccggagcaggcacggcgataacggcgtatatcgtatttcgtgccacctgtttcctgctccgtgtctgcctttcagccgtttatgcgctgggcgtggctctgcttttcctgtcgttgcttttcttactgatattataaccataaaaaatagaacatcatgcagtcacttaacaaaaacggggtaagcattacccaaaccctaggagaagagaggaatttgtttgccgtttagacgcatttagagaatagatttattatcggtattcaataaaagccagtttccaatattggttaaaacacttgaaaaatgctgctgataacaaagtaaatgaatgaaaatcaaaagctaaaaaaggaaactggcaggagaaatccaaaacgaactactttctttcatgagcttaaacgggaaagaaagtagcaaagaaacctttataacaatctttgattaaataagatctattttttttacattcggaagccctgtaaaagaatctttccctacagggattgcatgaatgctttcaaaaaacgtatttctgtcattccaataattaatatagaacttacaattatgcttgatcaactctttttgaatagattttaaataatcaatctgcattgtattgattaaaagtacttttgaaatacttaatgcaaatttcaacgtttgaatattactgtattttttccaaatttgattcggaggaaatatagaaacagtagttatgagattattatcccatatatttttgatatctttccttaatttcaactgtagaatgcctgtaggtataagaactataactcttttttttctggttatcaattcttttagcaaatcagaatcaatactagaattaagacttaatacaaatatgatatttgtatcttcaaacctgtcaatacatttaattaatgcgctaaactctctttcttcagccttattattaatgattaatgaaatggttttctttgttaaaatatttacatctcccttgatgtataaatctgtggaagatttaccttttaattgaatcggataatcaaaatcggatggaattatatgctttatattcttattcttgagtatttctatatcctgttctgaactatgtatattgcttatgtgtgaacttttaggctcaaatacgagtatttcagtttctagtcccgacaaattatcaataatcatctcttttactttctcccaatccaaaccaccatgtccacagcctaaagcaggaatcgtgattattgagtttggtttatcttgtagatatgtttttaaccattttaatccatctattatatatgaatattctgatggctttttccagtcatctttagttggaaaattaattatgataacatcttcacttgattcactgaacaaattcttacttttccatacgtggggctttcctgggcgtataagaccttggttgcataattttacatattctgtattcatttctggatacttattcttgaataataaagcaacacctgcccccataacaccaacacaattaactgtattaattcttatgtcagctttatagtcgaaaaaattaccttgaacaaatcttatcattctaattctgctaatacttttttcttaaaatcatttatttcgttcctaatgctgtcggcccatgtttcattaatagaagaaacatcagccaaagataaagctatcaataagtttaactcattttcgtcttttacaatatctataatctgttgtatatctcttcctctacatataatatctccgactaagtcatgataaacaaccaataagcagatttttcttatctcttcttctgtaatattttcaaagtcttcagtaagtattctttctaacataggaatagcatcaacaggatgatctggataagctttttgaacacctttgttccaagtccacttactcttaggccctttaccaatatcatgtaaatatgccgatattttcaatatatcttgatcctctttgctgaatccttcaaactcatcgagttgttgtatgttatcaacaactaatttcgtatgatcgcttacattttccttatgtatagtattatctgtttcaagttcgaagatatcatttaattcttttatgatgcaaaaattattatctatttctcttaaagcattggttacatcagaaaacagatatttcttattcttgttttttctagttttttttatagcccttattaatctagtaaagtagttctttaataaatgaggacctgttactaaagtttcagtacttctgtccgggaaaaaaaacttagtataaaaaaagcagtatttacgattagcaaactgataaggatatagaattttaggaggctcaatattattatctctaaatgcctttgttacaagttttttaataaaatcattatagacaacaattatatctatatctgaaatatcaacattagagtgaattaacacttcggccattttcttatgtcgatcatcatcagaaaagctccatttcctactatctatattttcccaatctaaacaatttagatcacttgatttttcataaaaatttggtggtggaattgtatttgcagatgcatcagtaaacacagtatttttattttcaattttatcaattgataaaccgaaaaaaatcataaatggctgatcttgattctttctgttaataacagacaaaaacattggattcatagatgtaaaatagaacggaacatagtcatgaacttttccttttggaccacaagtaacatccatatcatttctacgtgcctgaatgccttttgaagcaacattttcatgttgaattcctctggcatttttaatgtttgtacataatatgccattttttattatcgaatctaaatttttaatatgtgtaaaatgaaaaaaatatctccatttatgttcttcgggtattgccataacgtgatgtatttattttgcaaagataattaaaaagaaaacactctatcaaaattgatggagtgtttcttaacacattcatgcaaagagaattattcattattattgttaaatgagaacgaaaaccactgcatctgcccgaagctgtcaatcacataaatgtctatcgtctgctggtctgtcgatgccgatgtgtagtagagccggaacgtttctttctccagtgggtacaggtcattgggcaggaacaccgtaccgttatccatttccagcttccctttgccgtccggctggaagtacctgatttgataggtagtcggctggtaatagccaccacgcaccagttggcagcgtatttcggcggtttccccgactttcagccttttgggtactggcagcgtttcgatgctgaacgggtacgcctgctgaatatccaagttgtcattacaggcggtggcaagcacgagagcggccactatgtagcagcccatgatgattttatacattacattcttcatatacattattacatatagtggttagttgataatgaatttcagtcctaaagatacctgcgtgtggaacttgcctatgtccgagccaaacaacgccctttcccttgcgttcagcagcagaaccacccggtcggtcaggtaggcttccagttccagcgtgagcgcaccgccgtaaatgaagcagtccttatccagcaaggtagaaccgtccggcagcagtttttcgcttttgttgctcacctcatacccagcgagtgccgacaatcccagcgagaggaaaaaagtctttcgtctgtccgaaaggaatttcaagtaatagccgccctctgcggtgaactgttcgactggtatctgtatatccttgtagtcatacttcttatgcaggtattccccgccaatcacccaacggtttgcgttcttggtgtaaacgctgtatgccgccccgatatggtaggcgaaacccgtgttatcattccagtgtacaccgtccgctatgcccgccgtgacctgcaagcctttcatgcctggcaggtatctttgtgcgtgtgcctgaaacgaggtcaggcacagcgcaaagagcatcattataaaaatgtatcttttcatttcctatttgattttgagttcgttaatcacttttgcgtttatgatgtcggcgttctctactcggataacctgatgccgcccgccgtttttctcgtagagttccacaagtagcagcttatcgtccggtatggtgaacttcggcagggcatacacagtgcggacggtacttttcccggcaatctctactacctcgttgtaactgcgtaccgcatccagcaccgtttcctgaatagccgtgcgcttcggtactttcttatcgactatcttaaacttgatgaagtccgtgtcgaaaggcacgttggaactgttcttcgtctgcgtgtgtacatagagcatcccgttataggtgtaaatctccttgattaagaactgtatgccgaaacgcttgctacccaagtggcgcacttttcggtcgttatttttatagatactctgcattatcagcttcaccagtagcgggctttcattacctaattcccggaaatagatgttcatgcgggtatgcgagaaatcggacgtatcttcattttccaagaagtctttcatttcgatattgagcatttccggctcacgggcatacttggcgttgaatgaaaagaaactgccgtcttcgcaaatgacggagaagttcgtttctcccggaaaaccctctgtcgtggcttttactcggattacgttctccgcaccgtccgcctttcccgctatgatatggttgcttcccaaatcgacatatcggacggcggcggggaagatgatatgcaccgtcttggcaaaggtcacttccacgccgtagggcgttaccatttgacggtacgggagtttccgggtaattccccggtacaagtcgttgccagccgcatacttcacggtgtcggtttcctgtgcgtttgccgcacacacgcccagcaagagggcgaacattacaaaaatctgtttcatcgttaattgaaattttagtggttgataaaatggttattgttgtttggcgtaaagcatgactttatagcctgctttcagcttcactttcacggttcggaacttcttggcgagatagccggacgttccttgcagcaacccccttgtcacgtccatagccacctgctgcccggcactccgtgcaaaggaaatgcttgtgcccagtccgctgccgatattcgccatagcttcgttgaacgcttcctgctccatagaggacggtacggaaagccccttttgcccgtccgtgtcgaacacggcaagctccaccgggatgatgttgccagcgtactcaatcgaagacaccagtatgtcgagccgttcgccctgcacctttgccgtacccgctacaagggtattcttcggtacaacgatgttccccgcctgcatgggttcgagcagccggagtttcaccgcctgcccgtccgtcagggtttggtcttggtggatgcaggcggctatcgtattccttcccatagcgtagcccgtgcctaccgccgtgttgaagccgtagtttcgtggctggctgtaagcccggatgaagtcggcatcgctcatgggctgctgcaatcccgatacggtcgtttcccggattgcctgcaccgccaccgcatccggcttgcggtcaatgccgcccgttaccgggacttgtgcgacttgtccctgcccgctgttcatgtactttgccgccagttcgtaagacttttccaagagtgccatttggtcgtcagccgtgggtgtggcgttctgctgctgttgcagtcggtcggtcagttccgccacctgccgtttcaaatcctccttttcctcgtccaccgggggcgtttcgtagaaggtgcttaactggcggttgatgtcccgataggcgtttgccgaagaagcaccgccgccccgccggggttgcgcatcttcttccggcatcaggtcgatttccgtctgcggttcttccctttcatcgtccctcgtgaaaccgaagtcctgcaaggattgtatcttgtcctgctgtttgcgacttatcatcgcctgctcgtatgccttttgcttgtcggctataatcccgtcctctgcgggcaggggtatgtcggcgttgaagccgcccacgctttccacattcacgtcctctttgccggagggggcgaatatcaggtacatgcacccggcaaaggcaaggaacatcagcgggaagactatcattttcctgcgctgctgcacctgttgtggggtaagttcccgtttgggcttcttttccttttcaggcttcccgtccgtctgcggtacggtcgtgccgttctcattcttctgtacttcttccatattgcggtctgtttaaggggttgatactgttgattgtgtcattgccttgcaatggcagttgtctgatatgttctatttgcaggcgttgcccgtcccgtttcccgatgttgtagattgatgaaacggtgatatagatagacaagccactaaaaaagaagaacatcacgaggataaccgccagccttttgcccggcgtaatccgtccgcacatacggcgcaggtggtcgtccgtccagtcttgtacttttccgatataactctgtttcctttccatacggctatcttttgacggtctgtaaatccttgttttcggtaatggtgaacgcttcgatgatgaagccgtgcgggttgttgtcgctccgtgtggcgttgagcaggcggcatgaggtcacaaggctgcgtaccgtcaggctgctttcccggacaatcaactgccgggcataggtgttcaccttgtaggggtactggtcgaagtcgcacttcacgctgtcaatctccaccgtctgcgtgacgtttcccgaaatcacccggttgtagtagcccttttccgccaagtccttgtaatagttgaaagcggtcttgtcggcaaggaacagcgagcgtttgatattactttcgatagcccccttgtcgggcgataaggtgaaaaacagttcgtgaaaacgccgcacgtgcgatttggcttccactggtctgttctgtgccatgtcctgcgagagtgccaacatcaggcttttgccgttgtcgaggacgtatatcttctgccgctgcttctcggcgaagctgtacgagttccacacggcaaagcccgtcaccagtgcgcacaggcagatgaataccagcgcaaagagccggatttgccggaaactcgtttcgatattgtttaatgacttaaattccatatccttaaaaaaattgatgttgtttatttgagtagttttcccgatacctttccaccgactgcgccaaccgcagccccggcgaccgacccggctttcgacacgttgcggttataggcggacataccgccagccgacacaatccagcttgccaccgttggaatggtgaagtaacccacgatgccgataatcataaagattacatacacggtgctgctcccgtcaggaatgaaattcgggtctgaaagttcctgaatgtccttttggagcatcagcgtttgtatgcgagccagcacactgctgaacaagtcagacacgggtaaccacaggtaaatggagatatagcgtgaaatccactgggtcagcgtgctttggaaaccgtcatagacagaaatggcgaacgccagcggacccagtatcgaaagcacaatcaggaagaacgtgcgcagcgtgtctataatcagccccgccgcctgaaagagcatttccagcaactccctgaaccagtcccggacggacttcttgatgttgtaagccgccctgtccatgtacatgcccgtcatagtcaccatgtcggagggcgaccagcccagttcttccagttgtctgtcaaattcctcgtccgatgcgaggtaagccgtttcggggcttcgcatcagggcttcatattccagtcggtctttttgcgtccggtactcgttcatgtcgaaagtctgtgtttccataagctggttgcaccctttcaccactggcgacaataccgtgttgatagtccccagcacgaacgtgggaaaaaacatgatacacagccccagcgcaaagggacggagtagcgggtacacgtctatgggttcggcacgtgtgagcgactgccacactttggcggctacatagaacaaagctcccagcccggctatccctttggctactcccgtcatgttgccgcacaagggcatcatttcatcgtacagcacccgtaacacttgatgcaggttgtcaaaatccactgctgctaataacataggcataccatattatatgttaccaatagcgttcatccgccgagccgtagagagccaacacccggtcggtgtcgttcttcttcttcgcccgcaggtaggacacggatatgttcttgcgggtatagtagttcacaaggttgcggtagttgagcaaacttcgataagcgttgtcgatgattgccaaccgttcggcatccgtcagcgacatacccgtgatgttcactacatttttcaagtcctgcaacacgtccgagctttccgacatcagtttggcatagccgaacgatattgcggaaagttcgtcaggcgtgaaattcgggtctgccagcatgttttggaagttgcgcacgtagatttcggagatttccgccaccagttcaatggacttcttcaccttgacaccacccttaaccacgtcatgcaccgctttgagcgcatcgtaatattttttaccctgctggaaaatcttctgcgcttccataaagccgtccagcgtgttcttggctgtggtagaggtctgcactatctgcttggtggtgttaatgataccctgtgccaagttgccggggtctgacaccacccactgggcggatgccctgccgatgaagcaaaggcacaccgccataaagaggattattttcttcatgttcctaatttttaagttgttgatgattggggattgcgtttgctttccgcaagccgcttgatagccagttcaaggttgccgcccagcttctcggcaagggcgaacagttccattttctcgctttcctctgtagtgtacgtgtagtattcgtccaacgaaacttctgtggcgtacaccgccgactgcgtaccgcccagcgaaaagaaaacttccttgtacttccgtccggggtggttcgccatgttgatggacaatatttgcgaacgctccttgtcggttagtcccagcaggttttgtatgctgtcgaacttgttcagatattttctttggtctaacaggattttgcagtccgagttattgatgatactctctttcacgataggggaagaaataatatcctctacctcttgcgtgactacaatcgcttccccgaaatacttcctgacggttttgtacaaatattttatgtagtccgccatatttgcgcttgcaatcgctttccacgcttcctctatcaagattaattttcttattccctttaacttgcgcatcttgttgataaaggcttccatgatgatgatagtcgttatcgggaataaaatcttgtggtctttgatgttatccaattcaaagacaatgaagcgtttatgcagcaaatccagttccttgtcggagttcagcaggtagtcgtattcaccgccacgatagtacggttcaagcacgttcaggaagttgttgatgtcaaaatccttttccctgacattcttttcggcaagccgctgtcggtaatcatcccggacaaactcgtagaacgtgttgaagcagggcgttaccgaacggtcattgcctatccgttcgatataggcacttaccgcattggacaacgccacttcttccgaccgtttcggggcttcatcgtcccgcttccacagggtgagtataagggtcttgatactctctttcttctcgatgtcaaataccccgtcctcgacatagaacgggttgaacgctatcgggttttcgtttgtgtaggtgaaataaatcccgtcctcgccgtgtgtacgattgtggataagctgggacagccccaagtagctgttacccgtatcgaccagcagcacgtgcgcaccctgctcgtaatactggcgcaccatgtggttggtgaagaaagacttgcccgacccactcggcccaagtatgaacttgttgcggttggtcgtgatgcctttcttcatgggcaaatccgatatgtcaatgtgcagcgggcgaccgcttaccctgtccaccattttgataccgaatggcgaaagcgaactcttgtagttcgtttcttccacgaacaggcatagagcctgacccaaaaatgtgtagaaactttcctctgcgggaaagtcggcttcgttaccgggtatgcccgcccagaagagcgtgggcgtgtcggtggtgttgtgccggggcttgcactccattaaggcaagctggcttcccacatcgttgcgtatgcgtttgagttcgtcccggtcatcgctccaagccatgacgttgcagtggcagcgtaccgatacaagccccttgctgtgggcttcgttcaggtactcgtctatccactccttgttcacttggttggcacgggagtaacgggagagtgattgcatgttccgggcggtctgctcgaagttcttcaggttctcggcgtggtcgtctatgaaaatatactggttatagacgtggttacacgacaatagtacgcccaccggggcggcaaaacttaacctgcaatcgcttctatcggtggacaacttttcaaaccgtgtatctgtcccgaccttgccgggcaaatcttccacgtccgagagcgtgtgcaggcacagtatatcgtccccgacacgcatttcttccgggtacagcccgatgtctttcaggcaggtggtatcggtctgcgagagcgagaagtatttctcgatgatgcccgcctttccgtcctgcccggtgatttccgatgccgccagccgggtaagggtgacaaaaccgctgtcgttcataattcgttcaaactgcccgaccgcttcgatgaactttgttgccgcttccttgtcggctatctcctgcggtacaatcctgcctcggcagagggtggagaagtcgctctgtcggcggcttctttcccttgtcgttttcgtcaggaacaggtagcagtaatggttcaggaacgggcgttcattgaaatgccgttcaaaactccgggacaggaaactaagttcgtccctttcgatgtcgggctggtagttctccttgatgaagaagtcctgcttgtgtactatggagtagtcgggcagcaccttgattgccttgtaccatgccgaatgtatggcttcgtactcggcactggtgacggtgaacagttcgggcagttccacccggaaagccaccgtgatgtcggcatcctttgaaatgatgcagccgttctccaccgccaaaaggggaaacttcctctccagcgtggtagcctttaatgtattcctcatgttctttcttcctttcttcttttgtagttgaacagtcggggtatcgcctttcggctgataatgaagcgtgggtgtcttttgcgggcggcagctttcatcagcccgtgtgtaccgtatcgggcattcagccggaacgtctgccacacgagcagcagcgaagccgacacgatgaaaccgatacatagccactggttcacgcctgccatgaacaggacgatgaacaccacgaagacggcgagcaggccgccgcaaaagatgaaaaggtactggcttttcagacccttgaactccacgggcttcccgatacccctgtttaccggatattcagacatagccgctggtttataggaagaacgaccgtaggatagtggcggcgacaatcaggaagatacacgccccgaaccaactggcggcagtctttgaggtgtcggggtcaccgcttgaaaatttgttatacacttttaccccgccaatcaagccgcagaccgccccgattgcatacaccaattttgttccggggtcgaaatacccggtgattaggttcgtggcttcggtgatacccgcctgcccgttgccctgtgcgtaggcacttaccgcagcggcaaggatagccgccgacaaaaagattttctttttcattgcgaattggattttaatgccggggtagcgggtggatagtccgcctttcccggctgatgaataacttgaaattttagtggctgcggcacggatgccgtctgttggttttagggttgccaatcaaccgtaatcacgctgtttcatgttgtcagtcttatacattattatattaaaggaagtcgttcatgtcgaacgcttcgtgttccttgcttgtattgccagttccggcagggacagcagccgtagccagttccgctttgttgcgccccagcagttccgctacctttgtcagcccgccgttgatgttctccaccaccgcatcgtagaggttcgtcccctcgatgccagccagtgtcccggcggcttgccgctgttccgcttcggtggggttatcggcgttcgccgtgcgtaccgcttcgcccagttcgtcaaagctcacgcccgtagcccgcccggtatcatcgtcaccgtccatgtacccggctatttcctcgtcctcgtagtcgggttcgtcattctcgtaaccgggcgtttcttccgcttcgggtgtttcttccgaaatgttttcttccgactgtctgtcagcttgcggcgcaaaaatagtatcatttccagccgcttgcgggagctgtcccgatttgtcctgcgctgtcccgatttgtccacccttgtatcggctttcacctatcagcgtgtagtttgaaaactcgtttcgtgggagtggcgcatcgtccgttctgcccggtgatgtccgtctgtccgtgtagcgataccacagccacagggcgatatagtacaccgccagcccggtaagtatacaatagattaccataatcagacaggcttttggaagtggctttcgtacagggtgtttatctcgtcttggtactgctcgaagtggcgcagtagaatgttctccacgtagctgcttaccgttacctttcgcccgcctatcaccgtcacgatacgcatcagcttctcgtgcgtggtgcggctcacgtacaagggctgtcggtctgccagttccactttctgaaagtaggtttcccggtagtcgcccgtgccgcccttgcgcctgcggggtgtcggtttctccacccgtaccacttcctcttgttgtccctcttgggtaataaccttttctccaccgggcagtggcgcatcatccggcaggttctcccgcttggctggtacgccctgcgagataagttctttcatgaaatcttcgtctatcttcggcataccgccgctttgctttgccatatcactgtaatttgatgtaatacactatttccgttatcagttcttccaagttgcttcccctcaccagcgggcggctggcgggaaagagcgtggagcggaacaccgcttttttatccgctaccagttcctttttgtagcgtttggtgtcggggataaaggttttcatcagcggtagttccagttccttaatggttttgtcataggcggtgtaaaggtctgttttctcccgcccgtccaccatgttccaaaagaggtacagcccggcaagtcggcaggcttcattcttcaccaatagcttttggatagccattgcgaacgacaggctgctttccagcaccaccttgtcggctgaaatgggggtgaagatgtagtccatgccagcgagggagtttatcacgccctcgctgttcaccgtgccgggcaggtcgaaaaacactatatccggcacgtgtccggcggctatatgttcgtcagccgttgcaatcgccttttcgggtgaactgcataataccgggtaggctttcttccccagccgggtaaactgttcatacgccattcgcttgtaatcttcatcagcccccacctgctcggcatcccgctttcgcatcccggcaatggagtgttgtgggtagtcacaatcgaccaccgccacatcgtagcctttgaggtaatagaggtaactcgccgccagtacggtaaaggtggttttgccgaccccgcccttttgggtggaaaaggcgacataaaggggtgttttctcgttttccatattgctttcgttcattattggttgatagatttatttattgctttcaatcaatccagccatatagctttctttgtttccatattgcaatcttgaaagattgttttatttcaatcttgttttccagctttcattctttcttggaatattgaaatcctgcaatcacgttttcttgaaatcatgctttcaatcattctttcctgattggaatatttctttcaatcttgctttcaatattgaaatccgatgcaaaaaaagggagaaaaaacgtcccctgaaaaccttgtcccgatttgtcctgcgctgtcttgatttgtccaccaaccgcctattttacagcattataaatcaccgttactttgcagcggagtaacaaaccgctgggggtagaggggtaaaacagggctggttaatagcagggcttaccgtttcacgctaaccccaatccgtccgtgacggatttcgattttcgtcagaaaatagcaaggtgtgttttgtagcatacaaaaccgttttccgtgcctgaaaacgccttgccccttgcgggggtaaaaatcactccgaagtcgtaattttttaattcaaagaagtatggaaacaagaagaaccaacaagggcggtcgccccgccctcgcagacccggcgaagcaccgccatgtcctttacctgaatgaccgggagaacgcccgcttcctctcgcagtgggagcagtctggcgttacgagcaagtcccgtttcatcgccgcccggctgttcggcgaaccgttccgggtggtgaaagtggacaagtcggcggtcgagtattgcgcccgattgactgaattttacgcccagttccgggcggtggcggtcaattacaaccaaattgtaaaggcgttgcacagcaacttttcggagaaaaaggcactggctttcctctataaactggagaaagcgaccaccgaactggcggcactgaaccgccaagtcattgcgttaaccaatgagtgtaaggaactatggttgccaaaataagcacgggcggcaatatgttcggcgcactggcttacaaccaaaacaaggtggacagcgaggaagcaaaggtgcttttctccaacaggatgctgttaagcgaggacgggcgtttcaacatcggcgagtgtatgcgcagctttgaaatgcagatgcccgtccagttatccaccaagaagccgatactgcatatttccataaacccgcacccggaagacgtgctgaccgaccagcagcttgtggacattgccaaagagtatatgcagaagttgggctatggcgaccagccttatttggtgtacaagcacaccgacatcgaccgccaccatatccacatcgtagggttacgggtggacgagaacggcagaccgttgaatgacaggttcgagcatcggcgcagcaagcaaatcacccgtgaaatggaacagaaatacaacctgcacccggcagagaggaaagcaaggacagaacgcccggaacttaaaaaggtggactacaccgccggggacgtgaagcaccaaatcggcaataccgcgaaagcggcttgctacggctaccgcttccagtcgttcggggagtacaaggctttgcttgccacctataatatatgtgccgaggaagtcaagggggagataaacggcaagccttatcagggcattgtctattctgccaccaatgacaagggcgaaaaggcgggcaacccggtaaaggcttcccgtataggcaagtcggtgggctatgaagcggtacagcgcagaatggagaaatcgggtgacgcaatcaagaacgggaaactgaaagagcgtacccggaagattgtagccgatgccgtgaggaatacccgcagccgcaaggaactggaacagcagctacggaagcagggcattgacgtggtattccgtcagaacgacagcgggcgcatctatggcgttacgttcatcgaccacgacagccgtgtggtgctgaacggttctcgcttgggcaaggagtattcggcgaacgtgttcaacgaacgtttttcgggcgaaaccggaaatatacaccagtcagaagtggaaacacaacagcgggaacaatccacgcatcaggaacagccgggcttcacgccgaaagccgacatcgtttcgggcgtggcttccgtgttgggtgctttcggcggtttgctgggcggcggtgcatcaggcggtgacgagccgcaggacaccgcccgccaaaagagaaagaagaaaaagaagcgcacaaggcgtattgactaacttaaaaacatacaattatgcagcaagaagatgatttgagagggcttgcaagggttatggactttatgcgggctgtcagtattttattcgtgggaataaacgtgtactggttctgttactccaccctgaaagagtggggagtgacctttgaagtgatagacaagatactgtggaacttccagcgcactaccgggctgttctcgtctatcttatggacaaaactattttcggtggtgtttctcgccctgtcgtgtatcggtactaagggcgtgaaagaggaaaagataacatggacgaagatacattgcagccttgcggcgggtgtggtgctgtttttcctgaactggtggatgctggaacttcccctgccacatacggctggtacggtgttttacatcaccacgctgtcggcaggttacatctgtatgcttatggcaggtacgtggatgtcccgattattgaaaaacaatttaatggatgatgtctttaataccgagaacgaaagtttcatgcaggaaacaaggcttatcgaaaacgagtattccgtaaatttgccgacccggttttactataaaaagaaatggaacaacggctatattaatgttgtaaatgtttttcgtgcgagcatcgtgttaggaactccgggcagcgggaaatcctatgcggtggtaaataattacataaaacagcaaatcgagaaaggtttcgcactctattgttatgattacaagtttcccgacctttcggaaattgcttacaatcacctacttaatcacttggacggttacaaggtaaaaccgaagttttacattatcaattttgacgacccacgcaagagccaccgatgcaacccgataaatgccagcttcatgtcggacattgcggatgcctacgaagccagctacacgattatgctcaacttgaaccgctcttgggtgtgacctgaaaagtcacgtaattgattgttaaacagcaatgtatattgcaagatttaacccgctgttccgtcagcggtagcctactataaggtgcatctccagtgatgggttgtgccaagcttataggacaaagtacactttccgaaaggacaagactgaaccgtgagggaacgttaagggcggttagtatcataccgtcgagtggcgaggctggatagcatggttaacgtaagtgaactgactttagccgtcgtaaggtttgaaggagcgcaagatactttagctctcaccaaaaggtaagcagtcggataaccctcgcccatgttggggttacacggacacagcactgccggcggacttggcagaacctaaactatccgtttgtcaattgcgtggaacagggcaagcctgtatctctctcgtaataatgcgagtaagcgaaccgcaaggcaagccgaatggggtgcaggtatgagataacggagaaagcgaatgccgccctgtaatggggaggatacggattgaaccaacatcacgagttaatgagggtaacatcatccgacacgaaagtgggcagacttccgtatatggtaactctttacaagataacttttagaactttcaaaaggaggaaagcaaatgaacgagattaaaacatcgtgtgcgcctgctgacagcaggaatctgacttgggacggtatgaactggtccaagtgtgaaacctatgtccgaaagctacaagcgcgtattgtaaaggctcagaaagaaggcagacataacaaggtgaaaaccttgcagtggatgcttactcactctttttacgccaaggcattggcagtaaagagggttacttccaacaaagggaagaatacgtctggagtagataaacagctttgggactctcccaagcgcaagtacaaagcaatcggtgaacttagacgtcgtggctaccatccacagccgctccgtagggttcacatcaagaaaaagaacggtaaactccgaccgttgggaataccgaccatgaaagacagggcgatgcaagcattatatctcatggcattggaaccgatagccgaaacgacaggcgaccgtttttcttacggcttccgaaagaagcgcaggacaatggacgcaattcgtcagattgatacggttctaaatcgccagcattcccccgaatggattttggagggagatattaagggttgcttcgaccacatcagtcacgactggcttattgaaaatatccctatggataaaacaatactcagaaaatggctgaaatgtggagctgtattcaatggtaaactgttcccgacagaagagggtacaccacaaggaggtatcatatcaccgacacttgcaaatatggcacttgacggacttcaaccactcttggctgaaagattcaaaagacgtttcatcaactataagacattccactacaaagtgaatcttatcagatatgcggatgactttataatcacaggtcgagataaggaattattggaaaacgaggtcaaaccaatggtgatagaatttctcaaagaaaggggtcttaccttatccgaagagaaaactaccattacgaacatatacgatggatttgatttcttaggtttcaatgtaaggaagttcggcaaaaggctgtacacatccccgtccaaagatgcacagaaacgctttagggcaaaaatcagtgacatcgttaaaggtcataaaatgtgtaagcaggaatcgctgatacgaatgctcaatcctgtgataacaggttggggaaactattaccgatatggtgcatcaaccaatgcttttcacggttgcgacaatcacatttacaacctcacaaagaaatgggctttacgtcgccacccaaagaaacgcaagtcttgggttgcagataagtattggcatgaaattcgggggcgtaaatggacgtttgcatggaaatatgaaacaaaaagcaagaaagtgaactacctgacccttaaaaggttgtcggatatacattatactccgtacaagcaagtcaagggggaggcaaaccctttcgacccggaatatgatgattatttctttcagcgaaaggagcaacaaatgctggaatctctcaaaggacgtaagtcactcttatatttatggaacaagcagaagcggacttgtccgttatgcggcaaggagatagattgtacaaaagcatggaacgtcaatgaaatatctgttggtggttcaattgtacggcaacttgtccataacaactgctacaagcgaaataaacgaaactgttgaaagtatgagccgatttctaacaacaaatagaaatattgagttgcttgagccgtatgaggggaaactctcacgtacggttcttaggggagaagggggcagtaatgcccttgacttacccgatataagcaagcagggtgactttttcgtggaaagtccgattatccttttggcggctataatttggtatttgcggtgcgcccataaggcggtgtaataaatatctatttagcaatagattaggttagagttctatgaaaataagacctactgtcatccgacttatcccagagggaaacccgagggggagtgtagcatgtcggagaagccataagtcagccaactgccacgctgcgactgaatggcaagacagaaagacggacatgaggatgaagcctgaattggttgaacaacaatccagtggcacacaccagagctgtggcggaaggcagttactaacgccacatcgcatgtaccccagcaagtgctcagattgtttggggcgaagaactgactgcgacacgtctgcgataagcagattaacggacgaacgttgcatccgacagtctgtcatgcttgttattacacccgctaaatggggattgcctaaaccgaaacgccgaaaggctatagaagtcgttcttgaatattcggcatggcaacggagcttccatagtagtccgagcagggtaatgccctgcacatggcgaagggaagcagttatataatcaatataatcaaaggaaaatgtgagagacattatgagaaatccaaagaatgtattgaacaacttagtgaaacacagcaatgtatcgggctataagttcgaacggttgtatcgtattctattcaatgaacagatgttctataccgcctaccaacgaatctatgccaaacagggcaatatgaccgctggaacagacggcaagacagttgacgaaatgagtattcagagaatagaaaatctaatctccaagcttagagacgaaagttacaaacccaacccagccaaaagggtctatatccctaagaagaacggaaagaaacgcccgttgggtatcccgtcttttgaagacaagttggtgcaggaagtggtacacatgatactggaagccatatacgagggaagttttgagaatacctcacatggcttcagacctcgtagaagttgccaaactgcattaaaccaaattcaagatacgtttctcggaacaaaatggtttatagagggggacataaaaggcttcttcgacaacatagaccataatgttctgattggcatactcaaggaacgcatagcggacgagaggttcataaggctcatccgtaaatttctgaacgctgggtatattgaaaattggaaatacagacacacgtacagtggaactccgcaaggcggcatcattagtcccatactggctaatatttaccttgacaagttcgacaagtacatggaggaatacgcccaatctttcaataaaggcacaagcagaagattggataaagattaccgtcggattaaagaccgtaagaacaagctggaaaagaaactgaaatccgaaaccgatacaaaggtacggaaagaccttattgataaaatcaaagggtattaccgacagatgcaacaaatgccttgtgtcatggaaatggatgaagagtacagacggttgaaatatgtcagatacgcagacgacttcttgattggggttgtcggcagccatgaagaatgtgggcaaatcaaagcgaatatcacgcaattcatgaaagataagctaaaacttgaactgtcggcagagaaaacgcttataacccatgcacaagaaaaagttaaatttctgggatatgaaataaccgtacgcaactccaaagccaccaagagagataagaatggagtgctcaaaagaatgttcaaccgcaagattgtacttctactcccgagagaggtggtcaagaacaagttgattgactacaaagccatgagggttatacaaaccaatggcaaggaggattggaagccaaaggcacgcagttatatgatgaactgcaaaccggaggatattgtagcccaattcaataaggagataagaggattctacaattattactcgatagcgaacaatgtatctactctttgcaaaaggttcggttatattatggaatacagtatgtacaaaaacatcgccaaaaagcaaagcagcagtgtacggaagattaaaaagaaatactcgaaagacaaagactttgtaatcagttacacggatgcaaaagggcaatgcaaatgccgtgtgttctataatgagggtttcaagagaaaagacgctcaatgtgatgctaaatgcgacataattccaaacaccaattttctgccagcctcaagtcttgttgagagactaaaggcggaacagtgcgaggtatgcggagtgcatggcaaaacggtgatgcaccatgttcgtgccttgaaagacttgacaggcaagaacgaatgggagcgcatcatgctcaaaatgcaccgcaaaacattggcagtctgtccagaatgtaatgctaaaatacatggcaatgtataacaccaagttgaattataacggagagccgtgtacatggagacatgtaagcacggttcgggggcaggctctcggaaacctaccgcagaaatgcggcaaggcgccgagtgccgagcctaccatctatcagggcggtaagtattgcacgtttccccatgccatagaactgttgaacaagaaatacgctgatgttttcacgattttacgcagctatcccgaactggaaaactacctttccccattcgtagatgcttgggaatctgaagctaatgaacagttgcaggggcagattgcgagtgcgaaaatcccgctttcaaggatgataagcccggtactctattgggtaatgacgggcgatgatttttcactggacatcaacaacccggcagagcctaaaatcttggttgtcggcaacaatcccgaccgtcagaacatctattcggcggcactggggctgtataattcccgtatcgtgaagctgataaacaagaaaggtcagcttaaaagttcggtgataatagatgaactaccgaccatatattttcgtgggcttgacaatctgattgccaccgcacgaagcaacaaagtggcggttctgctgggctttcaggattacagccagcttacccgtgactacggggacaaggaaagcaaagtaatccaaaatactgtgggtaacgtgtttagcggtcaggtagtcggcgaaacggcgaaaattctgtcggaacgcttcggaaaggtgttgcagaaacgacagagcatgacgataaaccaacgggagaaatccacctcaataagcacccaaatggacagcctgatacccgccagcaaaatatccaacctcacgcaaggtatgttcgtgggggcggtagcggacaacttcgatgaacggatagagcagaagattttccactgtgaaatcgtggtggacaatgaaaaggtgaagcgggaaaccgcctgctacgtgaaacttccgcaaataatcgacttcaccgacaaggacggaaacgaccggatgcaggaagagatacaagccaactacgaccgcatccgtcaggaagtccggcagattgtcgaggacgagataacacgtatcaagaatgacccagagttgtgccatttgattaaagaataataaattcaaactatagctatttagaagttgatatattcactatctttgtagtatgaatcaaaatatgcaactagaattgttctcatctaaagagatagcgcaggtaaaacaagactattcctctacttttgtaaagaatatgattttacctgtacataaatggtatagatatacagctggtttttctgctgaatgggtaagggaattgattatttcagaaaaagcaaacgggagatgtaatataatagacccttttgctggttccggaacagttttgcttgaaagcgaatttcaacatgtaaattcaataggattggaagcacatccttacgtatatagaatagcaaaaacaaaactaaattgggactttaatcccagtttatttaaagaaaaggcattacaatttttagaacaagcaaaacatagtaataataaaatttctgattatcctaatttaatcgttcgctgctttaccacaccagttttagaaaagttagatgctttaaagcaaacatggtttaatcttgtagcagaagatgagatgaaagactttttatggtttatcataacatcgattttgcgcccttgttcatatgttgcaacagcacaatggcaatatatacaacctaataaaactaaatctaaagtcttagaccctttttacgctttcgaggcaaaagtttcagagttatattttgatatgttggatatgcaaaagaatcaagtaattgaaaaacatagcaaaatatataatgaagatgctcgtaacattgtatctattcctgataaatggggagatttggttatcacttctccgccatacgcaaacaattatgattatgctgatgcaatgagatttgaaatgatgttttggggggatattgaaggatggaaagatttgcaaggaacagtaagaaaaggtttaattagagcttgtacacaacatgtttcaggcatggggaaagaaatagaatcttttttacttgatgattcattattaccaatacgtaaagaattggttgctatttataatgagttgagtgaagttcgcttaactcatggaggtaagaaaaattatcatatgatgatagccgcatattttaaggatatggcagatgtattcttatcattgcgaaaagtaactaaagataattctttaatgtgctttgttattggtgattctgctccgtatggtgtatatgttcctgttcagaaatggttaggagaattagcgcttaaagcaggtttttctaattatagttttgagaagttaagagacagaaatattaaatggaaaaacagaaaacatgatgtccctttgcaagaagggagattatggataaaaggataaagaaatggcaacatcacattcgcataagtttggacaaattataggtgatttattagaattagcaataacacctcatttagaaaattttgtaaaagacaaggctctctttttagataaaaaaggggatagacctgcacgtaaaggtaaaaaagtaacatggactgataataatgggaataaccatgatttagattttgttattgagcgtaatggtagtgatgataaaataggacaaccagttgcttttattgaatctgcttggagaagatacactaaacattcaagaaataaagctcaagaaattcaaagtgctattattccgctgagagataagtatagtggaaattctccatttataggtgttatattagctggtgtttttacagatggagcattaaagcaattagaatctctaggctttaatgtcctatattttacctataattcagtcgttgagtcatttgcaaagtatgggatagacgctagttttgatgaaaaaacgacagaagaatcttttgaagaaaaaataagtgcatgggaaaaatccgaacataaacatgatatagcaaaatatctatttgaagtaaataaagagaatgtagtttccttttttttcatctttagaattatcaatatcaagaaaaatcgaacaagtgcttattcttccattgcatggaaaattgcaaaatatatcaaatattgttgatgcaatctcttttcttactgattataatgaagaagaaccatgttcctatcctatagaccattatgaaattgttatcagatataatacaggggataacataaatgctaattttaaagctaaaaatgatgcgattcttttcttgaggaattatttataatagaagcaaacttaaatagaaaatagaaaaaagagtaactcctttgggagttactcttttttttgaccataataggacaaaccgggacacagaaggataaatcgggacactcattgccgtcagtcaaagtatagcatatttagtcgttacctttggacgggaataatcccgtaaccactaaaattccaattatttatggcaaacagaatgaccccgcccgcagaggggcaggaaaaagacgtgctgctggtcttggataaacagcagggcaaggtgagtgccgtcaagggtatcgacaaggagggcaatttgcagaccgtgccgccgacacacggcggcgagttcatgcaggtggacaagaacagcgatgtgttcagcaacttcctttccaatttcttccgcaagtttcaggacacttccgggctggaacttttcagcgtaaaggcatccgaagcggaacagcaggcaaaggcaatcgaggacaaccaccgcaaccctacaccggagggcgacaagcgggctgaaatgcttcgagtgccgaagcccgacttccacgagttcaagcagggctaccgcttcgacccggcaagaatcgactgggagaacctgaagaaagtcggtatcaccgccgacaccctgaaaaacacgaaagacttcgaccgtgtgatgcgtggctacaagtcccggaacacctacaccgtttcggggacggtgggcggcttctacctgaaacctaccgatgtcaagctctctttctatcaggcaaaggacggtacggtagtacccaagctgcacggtgtacagcaggacgagaaactgttgcaacgcccgtataacggacacgagttcaccaagcaggaacagggcaacttgcagggtactggcaacttgggcggcatcgcacaaatcaaagacccgaaaagcggcgaacaaatccccgtgttcgtcagccgggacaggtacacgcacgaactggagtatatgcgggcagacaaatggaaatgccccgatacaatctgtaatgtgaaagtcagcccggaacagaaaaccgcctttgaagccgggcaagcggtcaaaatggaaaacctgcaattcagggacggcacacggcgcagtgcctatttgcaggtcagtgcggtggagcgtggcttggagttcctgccccgtgccgccgtccagttcttacagcagggacagcagcaggtagccggactaaaggacgggcagggcgttgagttcaacggtcatgtgcagtccggcgcacaaggcaaatcacccgacaaggtgcagccgaaagacgttacccccaccgccgagagccggacacaggtagcggtcaatacagagggcaagaccaacgaagccaccaagcagggcaaagagccgttgaaacaggggcagcaaaagcctaccgccaagcagaaagagaagcaggacaaggcgcaagacaagagccagaaagcggacaagcccaaaaagtccaaaggaatgaaaatgtagtacccacctttaaaaagtaaataattatgattgcattgatagcagagaagcccagcgtggcaaaagacatcgcccgcatcatcggggcgacacagaagaatgacggttatctttccggcaacgggtacatggtgacatgggcgttcggccacttaatccagcttgccatgccggaagcctacggcgtggcgaacttccgcagggagagcctgcccatactgccgcccgatttccagctaatcccccgtcaggtgaaagccgagaaaggctacaagacagaccccggcgtgttgaaacagttgaaagtgattaaagaggtattcgaccagtgcgacaagattattgtagcaaccgatgccggacgtgagggcgaattgatacaccgttacatctataactatttaggctgtaccaagccctttgtacgcctgtggataagcagccttaccgacagggcaatccgtgaggggctggataacttgcagccgggagagcgttacgataacctctacctttctgccaagtcccgcagcgaagctgactggctgatagggataaatgccacccaagcgttgagcgtggcagccgggcagggcgtgttctcactgggtagggtgcagacacccacgctcgtgatgatatgcagccgctatttggaaaacaagaactttgtcccgaccaagttttggcaactcaaagccgataccgccagcggtagaatcagtttcaccgcccaatctaccgccaagtgggagcagcagcccgaagccatagccgccctgcaacgggtaaaggatgccgggcagcttgcggtgaagtccgttgaaaggaaagaaaccagccaagaaccgccccttttgtacgaccttaccacgctgcaaaaggaagcgaacacgaaactgaacttttcggcggacaagaccctttccatagcacaaagcctttacgaaaagaaagtgatgtcatacccccgaaccgggagccgctatatcccggaggacgttttcgatgaaatgccggaacgtgtcgccatgctggggcagtacccccgctttgccggatatgccgccggattgaacggcgtaacgctgaaccgccgtagcgtgaatgacggcaaagtgaccgaccaccacgccttaatcgtgactgaaaacctgcccggtgaactctccaaagacgaacgggcggtttacgaactggtagccgggcgtatgctggaagccttttcgggcaggtgcgtgaaagacgtaaccaccgctgtgctgtctgccggagataccgacttcacggtgaaagggtcggtgatgaaagaagccgggtggcgtgccgtattcagtgagcaggaaacgggagaggatgaagaaaccgccagcctgccgccactccaaaagggcgaaaacctgcctatttccaacgtagaactgttggagaaacagaccaagccgaaaccgccgcacacggaaagcagcctgcttgccgcaatggaaaacgcagacaaggaactggaggatgccgaactgaaagccagcctgaaagatgccgggataggtacacccgccacccgtgcggcgattatcgaaacgctgttcacccgccaatacatcgtgcgtgagaagaagaaccttgtacccaccgacaaggggcttgccgtttacaggattgtcaaggacaagaagattgccgatgtcgaaatgacgggtatgtgggaaaccgccctttccaagatagaagcgggaaacatggatgccgacacgttccgaaagggtatcgaggtgtacgccgcccaaatcacggcggaactgctttcggtacaattatctgttgcgggcagtgaaacctgtccctgccccaaatgcaataacgggcgcatcctgttctacccgaaagtggcgaagtgttccaacgtggactgtacgcttaccatattccgcaacaagtgcgacaagcagctttccgacaaacagattgtcgagctggtgacgaaacgcaagaccgggctaatcaagggcttcaagggcaagaacggcaaggcttttgatgcttcgctggtgctggacgaacagttcaatgtcgccttttcatttcccgaaaagaaaggaaaaccgaagaaatagcctatctttaccgctgaaatttcattgtgataggttttgccacttatgataattgaaattttagtggttgcgcccggagggaaaccgggcgcattttttacaaatgcccgtcaaacaggtaggtggagcggacaatcccgccgtccagtaccccgctttccgacagtttccattccgagcctaatgtttccccgatgaaaccgatacccttgcccaccatgacggggacagtgtagatagtcaggctatccaacaatccggcttttatcagcgaagtaagcagcttgccgccgcccaccaccagcatgtcattttcctgtttcagttcatagaccctttgcagtggttcttcggtcaggaactccacgccgcagtccggcgtaacattggtgtcgtagtgtgacaccacacaagaccgcttgcttttgtgcggccacccgccccagtgttcaaagatgtagttgtaggtgttcgcccccataagcaggcagtccgcttccaagtattgtttactgacgatattctttatttcactgggtagccagtccagttcataatccggtgtggcggtatgtccgtcaagagatacggcgatgtgcgctttaatttgtttcatcttattaggtattaaacagtttatctttttcattcatagactgttcgccaatatccataaaagaagcgtggttctcacactgcttcgatacgtggtactggcaataccttttgaggaaacaggcaagaccacgctatgcgatagcataacgtatcctgcactgaatatcccctcaatttgaaaatttgccagttttcgtatcaggacgttcagcggaacgcttatgtatgttatatataaagacgaaatcacgaccggagccgttcaatcgccgttattctcttatttacttttgcaaaagtaacgaaaatcaatgaaataaccttgtaaaaagcagaaatcctgccatgtcataattacacggcaggataacggaaagcataaatactcaatttataatatgtttaatccgtgcgttcacggattagcctgtgtatgtcgcttgcccggtagaaatatttcccgtccagcatgatatagggcagtatgcctttcttgcggtaacgctgcaaggtcttggtgcttactttcagcataaaacataaatcctgattgtcaagcagtttttcaccgttcaaataattgtgttcacttaacaaacggtctattttcctttcctgcatatcgaatctgtccatgatacgctccatccatgccacaaaattttctttatccatatacatagtattatcggattaaattagacctatcataaaataactttggtttgccgggtctttaacgataatgtcccgttcacgcataaatcggatgtagcttttggcggtacgctcctttacgtccaagacctgctgcaactgttcgcaaaggtctatgtaggtgatatgtgtctgtcgcccgaagatgtcacgggctacgttcaccagttccctttccttgcgcttctccttttcctcacggggcttttcccccttgtacacgtgcatcccggcttccttgtcccatgcaaagagcattagaggaacgtccagcggactaccgtcacgcactttcagggctttcaccaccgactgcgtgggttcttcgtctttctctattgacaggatagtagccgccttgcgttgcagttcgctacccaaatgcccccgcagcttcaagccgttcgggacaaagtgcaacacgcaaagaatacacgtgttatagatgcctgccagccgatagagttcatctatcaccgccacgctttccgcttcatcgttggcactctttacaaggtcggcgatgccgtcaatgacgaccaactggatgccgccgtactggtagtagaacttatccatgctctgcacaatggcgttcaggcgttctttgcgtgacatacccgtcaggcagaacgctttcagttcatcgggtttgtccggctgtttggctcgtgccagcaggttgcttacattcttgaacagttgcacttccgactgttctgtgtcatagagcaagaccgccttgtgcctgccgttggcggttatctgtgttcccagcgtatctacttccgcaccagtcgggcagatgcagcccgccactattgcggctacataattgctcttgcccgttccctcgcccccggtgatgccgaacaggttgccttgtgttcctaacggaacgtcacccgccgaaataatctcttgcgctttggcgggcgggttattgaaatctatctcgcatgattttagcataatcaatgtgtcgctatacaggttgtctaaaaattcgataaacagtttcaggaaatcttcacgggtgttcccggctttgaagtagtcggatatgtccttttcctctttcgttcccagaagcgggagcagcaggcgtttcactccaaattcttccaacagtttttcctgcttgcatgaactttccctgcccgtcttgtccatgtcaaagagcaggacgatatgcttgaagcggaacgtcagccgatataccagcgtgggtgggatagtcaccgtttcgctgttgaagcagatagcgtgaaaaccgtgtgctgccaacgaaagcacgtctttctcaccgcccgtgatgaagagcgtgtcgcctttggcgggcagttgctccagcccgaagcagtagttttcgccgaagctgccgccatagaggaagcggggcgtggagaacgggcggtacagcttgatatgctgtttgcccttgtagccgtacatgggttctgccaccgatgaagtgtaggtgtacggtttgccctctaccgtttcgctgtgatactcccggagcgaacagaccttgtaacgttccagcagttcgggcgtgatgccgtactgttgccagtacaccaattcggcaagcggaaacttctgttcccagaactggtagggcttgacgggcttttcgggtgtttcttcggttttgtccgatactgtccggtggacggttgccggaggaatggaaacaggagtgccggaagccagccccaatcccaaatcccggtctataatctccagtatctccacgaagtcagctgcccgattgcagtccagcccctttagctgccccacgaagaaaaaacagtcgccgctataactatcgttgccgaaatctttcatcttgtacataccgctatggcggtcgaagtagatgttgcacgatgctttcttatcctgataaagcggattaagaaaattacggcctatgcgccagttgccgggtagatagtgcttgaacacggacaatccgctatttgtcctgcttagaatttcttctttctttaacataagcctcgtgatttgcaactaaattacgcatacattcatcattgctttttatcagtcgttcttccaataagcgtttcaactcacctatcttgtaataacaacgccctccaatattggaataggcaatagttccattagcccgtaagcgttgcagggtacggtcgctgatttgaagaaaggtgcaaacctcataactgtccacccaaatttcatcctcactcgtcctgctttcgtccaactggttgaagatgaagtttgcaatggcggtaatcttattgtccagttccttgtaggctttggactcgaatgttataatctccatattgctaacttattgatttgccgcaaagttcggaagaagaaataacctaaaagtcatggttgtacctatcatggtattactttttttttagggaaaatcgggtaaaataacggataatcccattgaaaaacggcattttgtcaataaaactacctacaaaaaaagaagtaccatattggggtaaacatggtacttctttacattgtaatacagaggattatttcatatcatcctcattcatccgtttaatcaggctatctataagatgatgaagatatgccgtccggtcttttctctctttcatggctatataagaagcatagtaatcgcccaaatcgacttgaaacaccgtactaagaaacttcatcatttcttttatctccacattgccattatttatgtcgcccgaagatacaagagaatatcctaattctatcaaaaagacttttttacctgtgaaacggaaaggatatttcagatacttttgaagattgtcttctatctgattgtctgtttccagcttcactaatcgcttgttcagataaatacgcagcatttcattggctataatcttagccaccttatagtcatatccggttgaaaaattcgggtctttatcgaattgtgcgctatcggtgcataaacgtaaatcggcatttccacgaacaaaataatattcatcgtacaccgttgaatgtgaacggtaatattggtaaaagtccaaattacgattgaagaaataggtcagattatccagttcccgattgatataacttctaatcacttcatcgctaccattggggcattgtgtttctatccgataaatcttatagaagaataataatcgggcaagtatttccggtttctgcgtcttgaagaatagtatttcatcctctttggttggaaagacataggtttgaactctcatccttaaatcattaagtaggttttgtaacttatgcaccattgaaagagaagtttcgataatatcatagccgtagaggtcgatttctgatatatcgacctctatttgttccaatatcctatccgtttcttcttttatactaccgtttctcattgccgctattgtttgtatttcagataaataatagcttgtattccaagcagtatgacatataagtattccactacccaataagccgccagtggaacattccaatggcttaatccccataaacaggacaggtaagcaatcgtagtcgtcacttgaaatatgaagaccgtccgtgtcgctcccgtcccggttacggcattcagatagacatagccgggcagggcaaagaagtaattcaatagcatgactgcgaaaggtagccacgctacttgtacgattgtcggattgtccgtgtaagcccccataatgggctggtgaaagagcaaggcaagggctatcagcggaacgcctgccgcataccccaaacggataacccggcgacaaagtggaaagacattcttcttttcacccgcaccaatcagattgccgaccaaagaactagtaacacccgatagggcattgacaatgacggagaacaaggcagaaacgcttctgacgatattcgacactgccagctccatttcccctaaatgttcgatagccaaaaagaacagaaaccaaatggctacactcataaagaattgcaacatgctccataccgagatagaaaagatttctttcagtactgtcatatccatgctccaatgtaagccatacagatgcctgttgatgtgtcgaaacacataggctgtcaggacgattaacgaacacagttctgccaatgacgatgcgatagccgcccccgatatgcccatgccgaaaccgaatatcagaagccagttcatgggaatatttaccagcacggcagtaaaagccgccatgttcagggcttttgtctgcgtgatgcctaccaagaatgaacgtaaggcaaggaacggaaaggaaaaaaacagtccccaaatgcgtccgtccaaataacggataacagcgttatagacatctcccgaagcaatcagatgtttcaggagtacaggagaaagaatttgggacaacaggcaaagaaccaccgccagcgacaacaggaaagaaaaaccttgaaagaaagtcttccccgtttccgaataccgctgttccccgttacggcgagcaattaccacttgtaaccccaagctgaacccgaagccgagcatataaatagccaagaaccatattccggcgagggcggatgcgcccaattccacatcacccacatgccccaaaaacaaggcatcggtaatatttatcagttgttcgataaggatgctcatcattacaggaaaagcgatgagccaaattttcttataggtataattcatttgttcaaaccaatatgatacaataagccatgccgcttggacagcaaaacaatcttgtagatttacacaattagggataatgacaaggcagtaatagacaaacttaaacgataagcctgtctattgctgaatagcgttaatcgagggtgctattcgcccggcgtagctatatgcacaactgctatttcatattgttgaacaactattcttttttctgttaggattgcaaagatagcgtttttctcaattagcagttttgggagaaactatatttttgtgctatacctattatataatatgtaaactagtcccccggaaagaaagatagctgatagaataaaccaatagttgttgcttatcagaaacttggctatccagaaagaagggagaaatgaaaatacatattgggtactatctgtaataacaaaaggtatgattaatcccaccataaccaaagcagatacttttgcaagtgccatgccttccactttatttcccgcgtatgccaaaataatcatagtagccacaacgcttagtatggtagccaatatggatatgataaatgtagtccatactgacatatctgatacggaacagaaagaaagcagcacgaaagaaacaatggctgcaaataaaacaggaataatcaatcttgatataagataacccttctttccaagtggggtgattgtgatatacctgttgattttcatgtccgtttcatccaataccaccaagaccgaagcgaagcaaatcatgtaaggacacataattgcaaggaataaatccaatatcggataatatagactgaaatcctttagcattggataatgctgtacaatcaaggggaaaacaaacctatatattgccgccaatagtaacggaatacatattattgcagataacataccatctgagaatatgtttctgacaaacattttgaaggaaataatattctgattcataattatatcattatatcgtcatcattttttttactgacaggcaagaaaaaatatacatcgcaatgcaccaaatgattattgccattagagacatgatactgatgtttccagacataagttctataaggcttatacttgggtgcaatagcataactcccgacttatagcccattgtataaattgatatgggagctacggatatgattaaagtgggaaccataatcagcataaagttattcatggttgaaataaaagcggaaagtgatattccaaccagtgtgaataatgccgaacctaacatgattccaacagcaagatgtatgtaagaatgttccattcctgagaacaatgcgattagcactccacttagcaaagaaatcagtccgatagaaattacctttgacaaaatgtatgcgtgtaccgatatgggcgaaactgctaatgcctgcattactttttcgcttttctcgaataatatgattgctcccataaacattaatccaatcagtacggggtctgaaaatataagggtagttgtgcatagttctttccacggcataggaagaatgcgcaatactgcaatatacaccattgtaaataacgtatatagggcataaaaaccatatttgtattgttgccgaatatcgccaagtattaaacctttaagtttcatagtaatttcctccctgttatttctgaaaatatattgtctaatgtcggctcattgctatgtattgataataaggcattagcttgaatcagagattgcagctttttgtctgtacttattttgtcaagtgcgattgtagtatttaattctttttgattctccaaatatgaatatgtcacttcattataacgccttgacatgataagattatgaggagtgtccatagctttaatgttgccatcgacaataaatgccacacggtcacaaagttcggttgcatcgtgcatattgtgagtagtcagaatgattgtcactcctttatttttaagctcacgaataatgtttttcatcacttgggagtttgaggggtctaaacctgatgtcggctcatccaaaaataatactttgggctgatgaatgattgaccgggcaaagtttaatctggatttcatgcctttagaaaaacctgccacttccttgttggcatgttgtgacagtccgaccatttctaatagttgttcggcaggaataagtttactgtcatataaagaaccaaagaatttcaagttctccaatgcggtgaatttctcataaaaacttgggaattcaaaatcgacaccaatactctcatagaaatggtttggtttatttctaacctcattattattaacagaaacactccccttatatttagggagcatacctattaatatcttttggagagtgcttttccctgctccagagggtcctaagaagccaaatatttctccgcttcttacttgaaagttcatattctcaataaatggtagttgagaataactaaacgataagttttttactgtaatcataatttttcaattttatattgtatgactaaatttgtctatacagtcacattgtaaattcaaagtatcgctacgtggcatatttgcacatagtcagttgatattatataatcttgttgtgctggattagtctttaaatagttgccgcactatccccctaaccataaacttgaaaacttcattgtaaatatctgttccaatggttttctcgtttagaatagtcaagaatgcagctcttaaagctcctgcaaatacctttgcgtcaattgatttgctttctggaataaatttcagtagttcgtttgccagcatgacatcatcatctacgtgttttgaaagtatttcttgagggagctttctgcttagatattccacgtcactattcacaaagacagatacaaagtatggcttgttgttgattagcaagtcagatataatatctgtcaatgtatcaaccgtaatattatcggtatgctcgtttatggcattcagaaattctttttccaatttcttatgatagtctattattgtatcgagaaaaagaagttcttttgatgtatagaacagataaaatgcccctttagaaatgttggcatatttaacaagctcatctacagaggttttgcgtactccctgttgctggataaagagcaaagctccttctttgagtttatcctttataatctttctttcgttgtcatcaaatgctttcgccatacaatgtgactattttgttattattggtcattgcaaacatacacgttatttttgaattgacaaagaaatattggtttatttttctcggaaagttacttcatatcaacttacagttatatctttcgacacaaattagtcgatataaagtccaatgtgattgtccgcagggtctgcaaatacggcaaaagcccctttcccctcggcttgaattttagtcttgggaataactatactgcaccttgcttcattacttgccggattgacctgtcaatgtcttcatagttaaagtaaattaatacaccatgctctgagggtttgaagttcggtgcataagatatagcacctaccgtttgtccgtcctgcacgaaacaagccattttctcgttattatattcggctaccataagttcaactcccaagattgtttgatagaaatttaccgattggtagaagtcggtaacgggaatttcaaagaatgcgattaaatttttcatgttctttttcttttagttgttattctgtcctgcgctaagacagtgcaaagttacgattggcataaggaactggatagaacgaaaggaacattttagagggtgcaacttcacacgttgttgcaccctccctgtttttaactttcactgacagtgaaagttttagattttctttcctatataaaatacatagccatagaaacctttatacttattgtataatgcttcttcaagatgttgaaactctatgagtttctttacggtttcattatggggatatttttccagcattagtttacgggcttcaatcaaaggttgatagtaatgttccgtccagcatttttccggcaatacaaatgaagcgactggaagatagccagccttctgcatttgtgcgactttaacaggaattgtatctatctcttgatattcctgcatccaaaaatcgtgtatttcagccggacgctcttctgtaaaccatgagctttccgaaactgcaatatacccatcaggtttcaaataatcacgccattcatttatacctttctcaaagccgatattgtaaatagcaccttctgaccatatcaagtctaaagattctttttcaaaaggcagattgtccattgagccgacaatccccttcactctgttttgcaaattcagctttaaggcatcaagattgaacttgtcaatacaccctggaaagaaatcaagtcctgtaatagttcctgatacattttgtgccaaaaccatagtttgacctcccgttccacaaccaatgtctgcaatttgcgcagtatcactcagattatcaatgaaacttaaagcctttaatgtaacatcaggacttcccggaccttgcctttttgtattaagaaaaaattcacaaattagatttacatcaaatccgtaaattgtgttgttatcgttattcattttcattgtatatatggcgtacagggaaaacataatgataccttacctatacgcagattaaaattataatataagcatacgaaaatagctcccgaaaagaattatccgagagtaaacgtaaagaacaatctacattagaaatgcagattgcttacaacacaatatccaattggtttgttttcttcatacgggcaaagatagtgagttgttttatgccatgcaaatttccggagagaatttagtgcaaggtgcaagtatatatctatatatatagcttgcaccttgcactaacctaaaaacatttattatcaatgatttgcgagtttcaaaataaagttgtatctttgaaccgaagataaaggcagacacaatcccgacaagggaagccaaatgttctttgaaaaaagtgcctaattcgtaccccttaaaagatagaggtacactaaaatattgattttaagacttgtgaaccgctcggttcaagacccaagcggatcactagaaggtcagggagttacatcaaagtaattctctgattttatgtttattacgctagtttacctgctccatgtaaacatgtagatgttaattgggggggcagtagaaatgaagtgtggatagggattttccccgtccatacctttctttagatttatacacacatacagagttgtgtgaaaggagccgacaagagcttttcaataagtttaatctttccgttaccatgaaatccaagggacagagattcttaaaaaagtaacaaccccaccggcggaataaaatgaatgcatatcacattccattcttatagcctaagtcttttctttctccagattaaacctttttatacggatactttctatctccataagctttggagttaactccaaagcttatggagataactccaaagacttgtggagataaaacaaacaggaaaaaagaccttaaccatacggcaggaaaggtttagggatacgaataagatctttttagggcgagtctgattccaaagtctcttacacattccttacggataaaaagtcccattaaaattcaactcctccctaattgtttccgtcaaatggtttcgtggttgcctctcccttttgggatatgcctttgcggctgataacgcatttgagtgttttgtaaaatatcatcatgtctgtcatgaagcaaacatggtctacgtaccagatatccagttcgaatttctttttccagctgattgcgtttcttccatttacttgtgcccatccagtgatgccggggcgcacttcatgtcttcttgcttgctcttcattgtatagaggcaggtattgtaccaataatggacgggggccgatcagagccatgtctcctttcaatacgttgaaaagttgaggcagttcgtcaacggaggtggcacggactattttccctatgggggtcattcgtaagctgtcgggtaaaaagtttccgcgacagtctttccggtcattcatggttttaaacttgatgatcctgaatatttttccattctttcccggacgttcctgaaggaaaaaaatgccgctacccctgttggctatggcaagtaacaagatggttgacaataggacaggagaggtcaataatatcagaaaggcggctataagacagtccagcggatatttgaaataacgggtatatctgctcttcttcatagttgtggattattttttataatccggcacggtgaaccacaggctgtcactccgtcaggtatgtctttgcacactactgatcctgatccgataatggtccatttgcctattttaactccggggttgatcactgctccggcacctatccatgagccttcccccacttccacattgccacataatgtggcgtgtggcgagacatgtacatagtcttccaatatacattcatgatcaatagcggcgccagtgttgacaatgcaatgtttacctgtttggcagcaactttgcaatatacttccttgcatgacaacactgccttctcctatttttgtatagggggaaacaatggcatggatagagatgaccgtaccgaatacagcgttttttttatacaattgttccgctatattttttcggatgctgttgtttccgatactgataagtatcgggaacattcgttttggatcgtaggaaagaacatgatattccatccattcctgtatgtggggattatcatctatgatgcccgtcagttcagtgctgttttctttcagtatatccatgatcactttggcgtgtccgccggctccgtataaatacatattgtcagtctttattttgttagatttgaaatctgttcttgatagacctttcgtaaggcttcccatagcgtccggcggtcgtatttttgaacaatctgtgggcgggcagccgaggccaattgttctacgagccgtggagaagagagaaatccgcacatggtgcgatataggtattcgctgtcatgaggaggaataatgataccgttctttccgttttcaatgatttcgttacatccgttgatgttcgttacgatgcaaggtaatcccatcgctccggcttgtaatattacattggggaatccttcccggtaactggggaatacgaaggcatccgcagcggctaaaaaagggcggatatcctcttgccatcccataaattttatggcgggatgtttgtgtatatgttctgctgtttcaggagttaccggatccagttccgcttcaaagtctcccactaggcaaagacgacagtttgtaaattcctgttgcaggcggacaaaagctgaaaccagttcgttgatacctttatcccgcaccaatcgtccgacgaagcaaaaagtgaaacaggggttccggcgatagatttccgcttgtctcattacctccggtgtccggtcaaaataagcaaggtcaattccgttgatgttaccgtttccgataagatgcaatgcccggctggtgatatggaaacgttccagatctctcctcacacctttcccttccggattgaggtaggtcgcacaggcacaagtgagtttgtctgtagcaattaataactgctgtttccaacctgtagttgaagggaatactagtcctgtgaaagtgtggatccggatgggaaccctgcatattcgggcggccatcatggccaacagccccgccttgggtgtcagcgagtggactatctgcggtttttctttgcggaacaggatgatgagcctgatcagtgcaatcaagtctttcaaaggggcaatgtggcgctccatcgggatagcgcaagttctgacgccttctctttccgctactttgtgtaattcctctccggacgaagagacagctaatacttcataagtctctgccaacatcttcaactgtccttgcagcaggagatggagcgaaaggggaacggtggatatgcgtattactttgggtttcatacagatggtttgtgtcgtaaacgataataaagataccccacccattcgtgcgttagttctggccaggaagccaagacgtgccaagatggcaggaaattcgttttttccccctttatttcgggaaacgtatcggtgatatatgtgtccggattcagccccgctgcatgaaaggtccatagcgacctgcgcatgtgggtcgcggaggtaatcagcagggtcgattccgttttcatactgttaccgatcagctctaacgtgaacgttgcgttttcccacgtgttgtttgcgcgggtttccaagatgacatcttccaacggcatgcccaaatctgccagatattgtttcatgtccgcggcatttccttgcaaaccttttccgtctttgctttcgatgatcgaaccgtctgaagctaacaccagtttccggatgcgtccatgcttgtacagccggatgccttctaataaccggtcggcaatctcgctaaattcgggtcggcttcgtttccagtcccaatagctgtagccgcccagcacgatgccgtatgtatattgtttcctttcaggtagggggcggtcatattccttgtaccattgttcggcaatccattgatagagtgcaccgttggagaataagagaaaaagcaaggctgacaaagtgagacagagccttttccatcgtttagattttaggaccacccctaagagaagaaaaataacgatataggttgttggattgatagcaagtgaaataaacatgagattttttatatatgtataagaatgaatgaaattatttttttaagtaatctaattggaatttcttttttaacttgtttcttacatagatcatatcgcatgttggaatcgtaggcggcaattgcttttataaaaggatcttctaaaaatgcaggatgattttgtacttgcatgatatccttgtatatagggtcctttaactcttccgagattctgttttttatttctttaggagacctgactttaaaagctatcatttggcaaatatctgattttagcacatttttcagttctattcggatataatcagaagccttatgatattgatatttgtcaattaaagccttttttatgtaataaagttttttcaaatcaggcaacaaacaggtgttatatcgagttgtcataccaccgaatcgatagttatatccacattctttgagtatgtaaattttagataaatatggaaataattggagattaaaggcaaggtcttcccctgtagtgatacctgttggctgtatattggctgcatttaatgaagattttcgatagagttttccccacatattaacggataaaatgttgattccaaaaaaagaaatatagtatttgttaaatagttttggttgttgtattagtccgttaacaggactgagtcccgtttttttaccaccccatagcgatccatgactcgttgcattcccatttccacatagtctactccagttttttctgccgtttcgtatattgttgtaagtattttttttatttaccagccagtcatccgaatatattgtgctatgtattgttcggtgttgcaaattgggatgataattgaaatcatggttatatgaatgtattaatttatttccaaatattaaaataaaacgtaaacgcatagaacgttaacaacgcatagcccaacattttttcatgattgacccaaaaacgttccttcatgaacggataaatcaataccaccggcatgatgaaccacgaaatctgggcgaaacggttggaataggcggcacggatcaccagcacccagaaagcattggtgacaaggaacgtattatatatccaatggtaatactcgtccttgaagttgcggcggaagatgaaatagtaccccaccgctacccccatggcactatataacagaaagtcccagcggaaagtcatactcatctgaacgatctcgcccaccatgttgtcacctgtcagatagccggaaaagcggtcgtctccccccatcagatttgttgccgccaaatatgcctggatacgtccgcctatggcatacgatacgcctacacatgccatccatcctgccagataccaatagctattcttgatgaaccaggtcagtgtgcctgctccaaccatcagatagatggatttgtggattccggctgccaacacgcataacccgatcattacgggtggacggttgacatacgtcattgccaagatgaacaaggaggctcccatgccattccggataccgtttactccgtaactccagaaagtaaacatgctgagtatgactaagaaaggaatatagtaataccctttgaagatacgttgcatagccagccacaatgaaccgatataaacagtggcacatagcaggaaaaaagtatggatgtcgctgtatctggcaaaccattgcataaggttgtaaaacaaccattcgccttcccatttccaggaaaagggatcgcgtgagttggctgcagtataaaatcctttggcgtagtttaccgtgtctccgaaataaacgctgacaggacgtagccccatatacaagatcaggattagtgtaaataatacgccccacatggcgttgagcgacacggtctcttttttcaatacgcttcctgtgtggcactgccatacggctgtcagtaccatgcacaatacggtgacatcgaaataatgggcatattcacttacggggataaagtctatcatatttatggatgttttttcgttatgttatttttttcgtgcttttgtctcgcacagtttcatgaatccgctgtacaggggcggaatgtaatagaaactgaggagtgaaagttttatatgaaaggggatatgtctgtttttcaggaactcgttggctgtttgcttttttagtcttttcgctgtaaggtgtgccagatgccggtaaggcgtgtttgacgcatgatacctcacgttgattatcatcttgaaaagcttttccaaacaacatccccggtaaactgtattttcttttggaatgttttgcaagcagagatagtaggaatcggcacggtctatgtaacggggatttaccttttgatgtgtgatactcgtaggtcgttgtacccagtagtacatggggatatctattatgacagcttgacaagatttttgatagatccggcagttgaactcagtatcttctgtaccggtctcttggaaaaactcattatccaacaactcccgtttataaagtttgttccatactacttgcgcttgaacttcttttattccttgctgtgggtggatatggttgaataaactttttatcattatttcttgtgtaagaatgctttttgtgtaagcggaaggaattgaataagatttgtcattgtcatatacctgttttcctaaaatcatggaaaagctataattaccttcctgtaatgcttccaacagcacttcatacatttgcggatggatataatcatcaccgtcaatgaaagagatgtattttcctttggcagctttcatcccgctatttctagccggagacaatcctgcgtttttctgatgaatcacttcaatgcgggtgtctttccgggtatattcatcgcaaatttctccggaatggtcggtggaaccgtcattcactaatatgatttgcaaggttgtataagttgatgccaatatgctttcgatggatgggcggagataggcttctacattaaaaataggaacgatgacgcttattaaatccgtttctatatcttttttcattttcttttttcgttgataagctgattaaataattccatccacatagggatgatattttttatatcatactgttctgctttcaaacgggcggcttttcccatttccttacgaagttctttatcctctatcaaccggcagattctgtcagccaataccttctcgttattaacgggtacgagaaatccatcatgcccgtcggctatgatgtcctgcggtccgcaggggcaagcgtatgagacgacaggaactccacaagacatggcttcgatgataaccaatgggagaccttcaaaaagcgaagttaatgtgaaaattgacgcttcatataatggggaaaatatatcataagtatatccttttaagaaaatattgtttgtcaattgattgtttcttatttgttcttccaattcagttcttaattctccttcaccccatatttctaaagtccagtcagcatgcctttttattacatacttccatgcggaaattaacgagctgaaatttttaggaaatgccaatcttcctacagcaattacttttttatttattaccttaattccgcaacactattacaaatataactttttaagtacctgagcaacaaaaagttgctcaggaatttgccatgtcagatttttcacctatcttagtgttgcaaatcaaaatatgtatcaaacccgacagacatggcaaaggtagcaattaaatccgagaaactcactccttttggaggaatattttcaataatggagcaatttgactccagactctcatctgtaatcgactcaaccctcggtatgagatgcaggctgtatggttatcaatacagcgaaatcatccgttcgcttatgagcgtttatttttgtggcggctcatgcatcgaggatgtcaccactcatctgatgtaccacctttcgcttcatccgacacttcgcacatgcagtgccgacacgattcttagagccataaaggaactgacccaggataacatttcctacacatccgacactggcaagacctacgacttcaacacggcagacaagctgaatacactgctcctcaattgcctattgtccacagggcagctgaaagagggcgaggggtatgacgttgacttcgaccaccagttcatagaggctgagaagtttgatgcgaagcctacatacaagaagttccttggttatcgccctggcgtggcggttattggcaacttgattgtcggcattgagaacagcgacggcaacacaaatgtccgtttccaccagaaggacacgctgaagaggttctttgaaaggtttgaacaaaacaagcttattatcaaccgtttcagagctgattgcggctcgtgttctgaagagatagtggaagagattgctaaacactgcaagaccttctatatccgtgctaaccgatgcagttcgctctacaatgacatctttgccctcagaggttggaagaaagtggaattgggcggcattgagtttgagctggcctccattctcatcgagaaatggaaagggaaggcataccgtcttgtgattcaaagacagaagcggatagacggcgaactcgacctgtgggaaggagaatacacctaccgctgcatccttacaaatgactacgagtcttccgagaaagagattgtcgaattctataacctccgtggagggaaggaacgcatcttcgatgatatgaataacggattcggctggaacaggcttccaaaatcctttatgggagaaaacacggtgtttcttctgcttatggcactcatacgcaacttctataaattcatcatggcgaggcttgacgtgaagaggttcggactcaaagcaacaagccgcatcaagacgtttgtctttaagttcatctctgtgccagccaaatgggtcaggacatcaaggaagtatgtgctgaatatctattcatgcaacaatgcttatgccaatgtgttccagaatgactttggataacaccgacaacttatagtcgtgattttgcgtattgcctcaagtcgcatggtggggtaaggggcatttatatgtctttatggtgacattcgatgcactgtgccccctttttactaacgatgcagattcttttcgcttctgtatcatattaggcgcgtagttgcggatttgaggtattaatgaagcttttttcgaaccaaatgaaataataggattaggaatgacacacacatccacttctgtattttttccccaatggacaactttatcttcttttgtaagtaccaccgtccggtcatattttttaaggtgtatgcgataatcaatgaagtctcccaaaatggcaaggagtttgtcgaatacactttgggcatgtaatgacctgtaatttttattgctatgtatctctctgataaaaaccggatgggagctgaccgacaggtaaggtaaaaagtttttctcacttgttccggtagatatgacaatatccggctgtatttggttcagtatctctttcaaccgttttttatgttgtttccttttatagataatacctttcaatatataaaaacgggatttccagtcatcttcaaaataatttatgtcacaatttaccaaatgtaccttagtggaaagggggaatactggtttgtctttattgtcggtcacaataatccaaacctcattctttagagctaatttatttgctttggctattgtgactctttgaatccctcctgcatagcaaatactatctgtacaatatgctattttcatcgttctataataaattttataagtttcaataggcacaagactcctgtggtagaccggaatcgtgccatttcaaaaaatagcctccagtgtatcggaaaatagttcatcggtaactgccggatacttgtcctatattcatgtgaactcaaaattgcggacaatgcaccgtgttgtttcatgaagctgaccggtgaaaaggtgatgttcaatccttgtcctatcaggcttaatgcccggcgatatgttaaagccttttcaaggtcttcccggtgtaagggagttatccattcttctattaaccggaataacaggttccactgttcagtcagatggggtttatacagtttggttagcgaggtgatgttgttttttcgataatggtagaacaagtcaggcagatagatggctttttttacccaagtgaaataatacacattgaagagtaagtcctctgtaccgatttgtctgacaggaacaaaccgaaggccatgttctttgatgagtgatgtcttatatagttttccccaagctgtagacaaactgtctatctttccgggcaaacgcaattcttgatcgttaggagctataagtcgcgcatagagccagtggattgaagatccttgataaaccatctttttgtcgctgaacagatattgaggaaaggactggttggcaaattcacgaatgtaagagaaaagacagacatccgtttgtttgtcggtgtgtgaaagaagtgttttgcagcagtctgttcctatccagtcatcgctgtccacaaacatcacccattctccacgggcactctccagacctttgttacgagcgcctgatagtcctaggttctcctgatggataacaaggatccggctgtccctttccgcgtatgctttcagaatatccggtgaattatccgtcgatccgtcatttacacaaataatctcaatgtcccgataagtctggttcactaacgaatccagacattggggcaggtaaggggctgtattataaaccggtacaatgatactgatcatgataattttcgtgctttataccgtatatatccataccaggttattcccggaagcaaagcggatagggtcagccatttgcgtggtgactccgatagaaaatggggatttcgtgccaacaaactgtctgccacatagtgcatcgcttcgatgaaacgtcgttgtgaggtaggagccagttgcatggaacttttgcggataaaagcaaagcctcgcgggttacgtatgtattggcggtacatgttcaagcttgaaccgtcggggcggtattctacgtttaccaacacttcgttcaaggccagtaaagggtaatcctgatctatcaattggtatttataaccgagtgatacatatttctctccttcaaaaatgggatattcgggatattgtttgatgacatccgtgcgatacaccagttttttgtctccccgcccgccttgtgcatagaatccgcctaaagtagtccgcctgcattcataaggaaaaggcgtaccgattaaatttccttggaaatcagcatccagtccgatgattcctgctacttcttttgaaccgtgtgcgttccagaatgtgataatcttctccactgcatcatcgggcatataatcatccgagtcgacgcaagtgttcaactctgtgtcgatcaaccgataagccgtattgtgtgcagcatgcattccttggttctcctgataatggtagcggatgtctattttcctctctgctatccatttttccacccattcaagggtatcgtcggtcgaaccgtcatccacaatcagccagatgaaatctttgcaggtctgccgtgacagggcttcgtaacctaaatgcagagtataggcacggttatatgtcggcgtgaagatggtcagcgtcttcttatctgtttctatcttgttttgttccattgtcctaaataataattctgaagccattcggcgtttttcacaatgtcgtaaccggcatcggctatttgttggtaataaccagtgcgtcggcttgccatacagcgcactctctctatttcgcatgcccattgtcgaggagctgtttccaatgagaggaaggagacttggtcggtcaaagccgcttcgcggggaatgcgatcggacacaacgcagggcaggccggcacattgcgcctcaaccatagaaacggaaaggccttccataaaagaggggaacaaaaacagatccatcgcttgcaacaggcggtttacatccggacgtccccccaacaaatgtacttggtctgtcaaacggaactgttgtacctttttttgaatggctttttgcaattcccccgtaccaaccagcagcaggtgtgctgtgggattaaactcctgcacatatttatgaaacacctccaagaggaactcatggttcttctgtcggttgaaacgtccgacgtgtcccacgaccgtaacatctttggacaagtgaagttcttgacgaacctccagtcgcaccgcttcatcaaacctgtataggaacgtgtcgatggcattgcgttgcaaaatcgcttttttccccaactcgtttccaaacaaccatcgggcggcttctttcccacaggtaaacccttgggtcaggtaagggcgcatggtatgcttgaaataggtgcggaaaagccatttagtatcgaataaagcgtgtgcgttgtgtgcgtgcgcaataattacgggtactcttcgccctgctgcttcccggtaaacgaaatatcccgattccgaacaatgcccatggataatccgatactccggatgttggtcgaaaaagtcggaaatttgttttctgtatgtattgaaggtgaacggatggagggggatcatacggtagatcttgccacccattgcctctatttcatcatcgtatgcgccccgttcctgccgatgtaccatgaaatcaaactgaacccggttgcggtctatgtgacggtagtagttcatgaccatcgtttcggcacctccccggttcatgatggtgaaaagcatcaatattctgataggttcttccattgtgacatttatttcattcgatttcctgtcagccgatgcatccattggctgagcttgtttatccatcggcttcgtttgatccatgtctggctataccaatggatggaatatgtattttcggtgcggtgtaactgcccgtcgatgtaatcatacggacagaaataatccgtaggatagagagtgatgtctccgagctgctgaaaactgccgtcctttctgaatccgtaaaccttttccagtttgcgggtcagctcttctacgttggtggtctggtccggtttcccatccggggtgatgaaacagcgatgatcgtatgactttaataattcaatgaagaaagagtgggagggttctgctcctatcaggttcgttcctacccattgagttccttcgaatcctaaaaaggccttattcgtcagtaacctatccaagggacgtaccaattctacatccgtgtccatatagacacctccttcgtgtaccaatgcccacaaacgtgccacatcgctcacaaaagcccatttcttggtagcgtatgcctcttcgcaatagcggttcagacggatgtcgaagttattttcgttccactcctttatttcgtaaccgggacaatgtttctgccagttcgctatcatgcggagtacttcagcaggcttttccttatctccaaaccaacaatagtgtattgttctcgggatcatgtgtttcctctttttatccttctattgctgaataaattttaccgacttctttttcgttcccataatggcggattcgtagttgtgccttgatggcttcttgttgtcgtttgtcggcaatgaactgtgccaatccttcagccgctccttccacattgtttgggatgataatgccgtccaccccttcttccagttggcttgaggaggtaggaaaacgggtaatgaccaccggttttcccaatatctgcgcttcacgcaccgttactgctttgccttcgtaacgcgaaggctgtacataaatgtcacatgccttgatgtaagggtagggattcatttgcttgccagccaaaacgaaatgtttttccatccccgtttccgcaatcgctttccgtatcaacggtttatctccgccataccctacgacataccaacaaacgtcaatgccctgttgcaccaattgacggcagatgtacactgcccggtcgatggctttaggataagagaaccgtcctacggtacagagcagaacaggatgttttgtttgtccttctcgtccttcgaatgcttgtaggaaagaagtgtcgaagggcagttccgcctgttcacgtataaaagtttcggacaggatattttccatcagtatcaacttgcattctaatgaagggaattttgaaagaaaacctttggaaaccgattcagaaatggagatgatgcggccgaaagctccccataccggcaattcccggcgggtattgatgtcaataaaggaatagtcggtatgaatccatgcccatttttgctgtgcctttactttgtcgcgcacaatgttgtgcggtgtaaggaaactgatggccaggtcatacgtccggccttcgttgatggagggcaggaatggagtagtacagtctgctacatattgaaatatggcctgactttcttttgccttcctccgtttcctgtaacaccagtccaaaaggtgtgctgcgatgcgcccggcagcaatgtcccaatacccttcgcggataattttccggatagggcgggtgagggtggtgtacttttttacttcgggcagaagattcacttccttgggtatgaggttcataaattccccgctatgccggtagacaaacagatccacttggcaacgcgaatagtctagggcattgagcaagccgatcagcgagcgttctgccccgcctatctccaggtattggatggcgatgaaaatacggggaggcgttgtgccatgtttgattggctgtctattttgatgtgatgactgatttttcatctttctctattaataatgtagagtgtgcattgatcacctctggatggtttcggcggatatatccccctatactgttgtatgtcaatcccagccgggtggcaatgtctttcagtgtttcggtggtcgtcccatacaggcggatcgcttcagcatatttttctttgctttgtctggacatccgtttcccctcagaggtctgtaccataccctgtcggtttgccaactccggttcatgtttgtgcaggtactctctgaatgtctcgggatggagcccgaactctttggcggcgtgggctatcgggcgggggtgttttctcaggctcccgatggctttctcgtatttggcggctacggttttcatccgctttttcgatttccgcaaatcaagacccccttctgccttgccggaaagtcctgcccgttccctcactaagtcgatatgccatttgtgcagataagaacgaagtccttccgctgtgacgtgtgttctttctgcgatttcttttagcgtgagagccgtgtccttataaagagacaaggctttcgcatatttatcttctgtacggagagagggtttgtaggtccttccgttgccggatagttcgcctctcttcttctctggtctggcctgtgcttccgaacgtttctttctcttttgttccagtatatttttgtgatagaacctcagatgctgtttgaaaccgcttggtgagacatggcatgccccggctatttcagggatcgtcatgtctgtctttttataaagctcaactgcttcggcgtattgtttggtgcaagccggggtcgccccacgatgggtgttgtcatttatgcccaaccagtggcgtactttctcgcgccaaggaatgacttccggttcatggatgcgcatgaagttggctagtcccgttccctccactccatgtttgcgggctatctgcgacacattcaattcgatatcctccagagacaagcatgcatctatagcctttttatatctggcatgcgacaccacattgggctttccttcggacatgatcttgacggcatggggattttctccttccaaaggaatgcgatggcggtgtaataccaattcgcgccagtagcggcgcaagtaactgccgagtcctcccgctgagacgtgacattccatagctatcgttttcagtggcatgtttgtctccgcataaagggcaactgccttgtcgtatttctgatgaagcgcgtggcgccgcagcagagcggatcgctgtctcggagtcaatcctataggatccggaaacggattttctttttccagttgtcccattggattcgcttgttcattgctttgctggggattcctcaccggctcctttgtgggataatctctgtctttcatctcttgatggaattgaatagccataccttttccctcatgttcttggtataagagctttagtggaaaaagttagatatcttactttttttgttcacttgagccgtgtgctttcataatgtgtatgaccgataatgtattgtgcgccaggtagaaaactgatcaggtaactagctaggacagaaccggcaaatgtcaataacgagacaatggttgtttgtacaatgtatgagtcgatgacacgaatgaactcccattgccaaagtaggtaacgcatgatgaaaatatgtatcagataaatgccgaacgagagtgaggaaagctgggtaagtgtctttctcatccgtagccagatctgccaatgttctatgcattctgccatacgataccagctcacacattgaattgctacaaaaacagacagataccaaaacagatcatagaaatcgactttccatccggctgttttgcatacgactggtgctgccatggcgaccgtcagcaaaggaaacaatgctttccatggaattcttttaggatattgtttcaaataatatcccaagacaaaataacctgcataacccgtaaagtaataaagaattccagtatctccggtattgatatttactactggacggactatggggaaacataggctgattccccatagtcccaaataaaactcgatttctgtccgactcgcatagttcaaccatcgactcaaaacaggagccaataagtataatcctatcaaagtgtacatgaaccacaagaccggattgccttgtggtgaaaaaggtaaagatcccaaggttcgcagccagtcaatagattcgtctctcatcagcgtgttacaacctaaatagaacaagctccaaaacagagtagggaacaatattttcccgaatctccttttcaagaaaatacttgctcctgtacggacaggaagcaataatgcccctgataccataaagaacagtccgatacaaggagcagtcaaatagctcaatgtagacaggaacaatccgttcccctccgcactatcgggtagcggagcgtgcatggcgatgaccatgagacaggctaaaaggcggaggaggtcgaatttagaatcttgtttcattatgataatcgcttaaattgaaaccatcttctgcacgcaattacaatccccatcgggatactgacatagagcaaaaaatcatatgaaatagctttcagtgcataagcaagatgccctcctaataaagaaagtgccaccatttgagcagcattgtatctcttttcacacattttttttgaaattatgatccgctgtcgatacatcatagcataacccatcggattatctcttagcaaacgccaagtactgtcgcttagccctccttgttggtactcgcaaagataaaccacttgattataccatcttaatttatatccatctaatgctatacgattccagataacttcttccggagtaaaattttccccctgccaaacaggaaaacgataacgattcagtttctcggtgtaaaacacctctgccatatccacatctaaaccataatgcgtccgctccaaattactgcactctacatatcctatagaattcggaatattatatgtttgtttcaacggttttctgttcaaatcccctctttttttggatatacctatgatgtgttcatccgtaattccatcaaaagccgagataatctgctcgacagcatcatcagtcagtaagtcatcgctatccaatatcataaaatactgtgcctttgtcaaatctaaggctcggttaatcgcccggttctttcctccattatcaatcgtatagaaccgtttatcaaaaccagtctcctctgcttgccattgcttcaacagcgaaaccgtatcgtccgttgagccgtcattgataaccaaccattcaaagttcatgttggtctgccgtttcaatgactcatacaatcgtggtaatgtatgttcgcgattataagtaggagtgaatatggtcagtaaattcattgcaaaacttttttataaatcctataagacaaacaaaaccagcctatacggtgcagccagtaaaagaaacgctcacccatatgatgcggtgtataagctaaaaaagcttgacgtacccaaggacttttatgcagtgattttaatccttcaaaacaatattgtttagtaattaagccttgcatcaattgattcatatatttgtatataagcatttcgtaagattgataggctatacgattgacgacctgtgcgttattcagataatccgacagcattctatgagaaagttcatatatttgcaacaaattctctggaatagatgatactcctgttgctactccctgcactcgtatccaatgatataaagcatgaggaatgaatctaatattttgagcatatttcaagtatccaatcataaaaatgaaatcctcatttatagagtaatttccatatttaatattgtattttcggataatatcaattttataaagcttgttacaatttatattcatgataccagatgcaaatgccatttccaactgcactctattcttgaactccaccacagtaagattttgttcgatgtgatctgtcgaagaaagcaattgtcccttactattatactcatctaccatatatccgcaaactacaaggtctacatccggacaagaacaaagtttttccaaataattgggctcaacaaaatcatctgcatccacaaagcagataaatttcccctgtgtctcatccatagcagcattgcgtgcagctcctacaccttcgtggtcacgacacaacaaacgaattctattatctttctccgcatactgggcacagatcttgtaaccatcgtcgacagacccatcatccaccaaaatcaattcccaatcattcctcgtctgattcaagacagaatctatacaattacttaatgtagtggctgcattccagaatggaacaacaatcgtaacataaggtttcatgtctattctatatttcaccccaataaattttctatttcttttacagtttgtaatgtgctaaaaaatgactttcgttgaactgcacgttgctgtaaatctataaaataattcttttctaccattgctcgtttaatagccgaataaaaatgttcccaatccgaacaaagttcaccaaagcgctccttctccaacaattcacttgggccagaacaatccatactaataaccggtactcccaaataaagagcctctgctataaccaagctataaccttcggcaatagaaggacacactaacaactgcatattttttaatatactataaggattggcaatgaaaccgggcatagaaaccacgtcatccaaccttaattcatgttgttgccgctccaaagccttacgttcttcaccttctcccaatatataaaccttaaacttcacctcttcctgcatcaattttttcacaataggcaacaaatggtcgaaaccttttggacgtgtaagacgacctattgccacaatattaaaaacattttcatcaacttctatcgtacagggcaactctttctttttctctatatcagattcgtctatcggattataaatcgtacaaactttttctaatccataatgttcacacatcatacgttccacagaatgcgatacacaaatcaccttatcgaactgtttataagccttaatctctttttcacgattttgataaattcctttttcaagcgtccatggcaactgtatcaaatcactatgtacccaagctacctttttaactctatgcaaagatgccaacaacttagtacagaccccctccacaaacgctacatacatatcaataccaagttgcggaaccacccatttagccactaaccatataggcagccaccgatagattagtttatatttcaacttagcccacaatccatcaccaataggaatcaccgaaacaatccttacaggcaatcgatgaaaatcacaatataaagcacccacatcattcatcaccaataccgttacctcaaaccgatgataattcaaatggcgcaaaatggtgagcagcaccttctctgcgccaccccctgaaaatgattcaataaagaaaagaatatgcctcataattcaaaaaatcatgtataatactttaataacacctaagttcaagcggataatgcaacaggagtgagaatgatgacaatgagaagatacgaaaagaataatttttcagaggaacagagaaagaagatttctttcccttttgttcccctgtggaaaagttgtttctttgcatcttccagttccccaacattcagttgcaatatgaaacagctaaccgaagaacaaaggtataacatttccgcttatctgcaaagcggaaagtcaagaaccgagattgccaatcttgtaggagttcatcgtagcactataagtcgtgaattacgtcgtaatagtgataaacgtaatggcatttacaaaccggatctcgctcaggctaagtatatgtccagaatgcgttcacgaaagcacttcgtgaagtttacggacgacttgaaaattcaagtagatatactcataaagaaagatttcagtccagaacaagtgactgggtttatgcgaacaaagggcttggaaacagtttctcatgagacaatctaccagtatatttgggaagataaaaagcatggagataagttgttatacaagcatttaagaagacggggaagaagtcataagaagagaggtgcattgactaatggacgtggttttatcaaaaaccgcgtggacatagacaagcgtcctacgatagtagacaagaaagtacgttttggtgatttggaaattgacacagtcattggaatgaatcacaaaggagcactattaactataaacgacagggtaactggactagtatggataagactacttagcgggaaagatgccagcccgctaactaaagctgccatcgatgccttggaaccttttagagaccaaatacatacaataacggcagataatggaaaagaatttagttttcacgaagaaattgcacgtaaactaaatatttttgtttactttgcaaaaccataccactcgtgggaaagaggagccaatgaaaacagcaatggtttgattaggcaatacttcccgaagggtacggactttagggacataaccaatgaacaggtaatgcgcgttcaaaacatcttaaactcaagaccgagaaaaagattgggttacatgaccccaaaggaaaaatataaattattaactaacaatgaattcgacactgttgcattgtctgtttgaattcaggacaaaattagaattgcagaaggtaaaaacaacatttttttcatccattcgggacaatcaattatttctttattttgtttcaaaaaattccaattaaccacagggtgaacggaactcatcaatttaaaagtttctctcaaatttctgacttttgatatctggtaaagattgtcaaccaaataattaaacaacttattcaccatatatttttttattgggaaatttccgtttgcttggtttatacaaagtaattgatagagttgattccagtattctatatcattttgcaaattataatcatatattttatgggacaagcccgttacgatatctatttgatagtagtagccggcatagtcaacattacaaacttgatttgcatgactaatgaatttaatgttaaaatccctatcttccgcgtacgataaattctcattaaaacgtagctgataattatcaattaccgtctttctataaagctttccatgaagggcagtcgtataatctatataatagaatttatcatcacgtaaatcatctaaagtccattctcccgcttcaacatgcttagtctttacgcaagtatcatctttcatgcaacttaaccctgttaagaccaaatcataagaaccaacctgtaataaattctccaacaggtgacggtcaatataatcatcactatctacaaataagacatattcaccctgagtgacggtcaatccgatatttctagcagaagaaacccctccattctttttatgaataaccctaaatcggttgtctttttgtacaaattcattacatatacatgcagaatggtctatagatccatcgtttattaaaatcacttcataatctcctaaagtctgattttgcaaagaagccagacagcgagtaaggtatttttctgaattgaatatagggacaatgatagatattttattcttcatttcttgaaatatgattcttttacttgtttcaaagtcttcaaaaagtctagtccgtatttcaaatccggttccagatgattgccttctccccattcgttccatgctttaataaaacatattttattctctttttgaacaagaatatcaaaaacattttccagatgcttttgaaacaatgcaggagtataatttgtcaatatcaaagaattttcccctgctcttgggctatgatcccaaccagatataatagtcggaataatattttctgctttatcttcctgagaaacaaaatatcttagtgcatcttcatatttataagtatgtaaagctcccaatttgtgcttaaaaaactctttccatttgttttgatataacaggaagtcctttaagcgtatcacattaatggcatccaacttataatgacaaattgcttgatactcctccggagtctgcgccaaacctatgaaataaatccctgcgaatccttctttttgagcaaatccattccataaatcaataaattggtcaatcaaaggaagcgaatcaggactaaaaatgccgaatataggttttccgcctattttggcatagcgctcgtctttgaaagctcccagcaaattatagaaatgttttttatgatcttcttcccctaaatattgttggctaatcattatttcctttgtctgtggattctgccaactgtgattagcccaacagaggcaaaacggaaaatcaggttctttactttccactactgcattaaagggtttttccatgatggtttttccatctccaaaccagtaatgccaataacaaaatccgtccactccatattccttagccatatccgcctgcgctttacgagctctaggcattaatagattatagaaccctaaatcagcaggaacatgaggctggtaatggcctttgaacaatggctttgcattttctgctaccgtccattccgtatgtccctgcccccagtatttattattaaactcaatctcataatattgaggaagatagtatgcaaataaactgatatcttgtttcatctgaatggatatataagcgttaaataataaaatattttaataaataaagcagataatatacgacctcttgatttttccaaatcacataaaaagaacaaattgtcacgaagtgttataatgctaggaatgttcatataaggagtattcttcgttgcaaatatgccaataatcttgaccgtctgaaaaaatggtaatattataacctctttatgggttatcaattcctgagccaaaatattctcaaaaagtccaccttcatcctcaataaagtctccaattcgagaagataacattctttccagtgttagaggagccgccacaaacaccacacttctaacaaaatcttgtgataacaaatccgatctaaatacattaggtaacttaagagtcaatgaatttgctattttttctattgctggcactattacacgccccgtaacctttataagatatttacatctttttaaaaaaacagaattttcagttgcatacaatataattacagcctctccatatccctttccgaggcttttatcatagttattccctttaaagcacaagtattccaatctaccagaatcaatataagagtgaaactcacaactcatatcaaaccctgtattctcaacgaaacagattggtagtgatgtttcttgcagataaaagttcaaagcattcacatattgtttccttcgcaattccacatcttgtaatactgttttcgacatcccgttaggattaacacatgctgttaataaaacaacaattctatgcgaattactcattatatttaaattttataataaataaacttccatcaaggaaatttcattttgtaaaattacaattaacacagctcccataaaggatgggataaaataagatgtacaacgctttctatgttcatcaacgaatagctcttcttcggattgaaacaaacaaatcttgccacaaacataaacgggagcatgtggaaagaatagataaattcaaacgttaacatgtcattcattcaggcatactttcgcttttacaccctaacaaaacatgccccattacaacaagcataatagcaaagtctttcattatatctatatactctatccttttattttccattgttattaaaattaatgttccacatatatgttctgttatttgttatctacccccaatatcatattcacaagatctgtcaaatcactctcctgtttctcatgtatctgctgatagcgttggagagatttttctgcaaactctgaatagttatcatcattgagcaccattagggcattgaatatggccgtttcataaataggagagaaataaacaggtgcatcacccaacacctcaggtatagagcaaacattggatgccaatataggtttgccatatttcattgcctccaatggtggatagccaaatccctcgaacagcgatgggtacaacaacgcatagcaattcttgtacgcctctcgcaaatctatatcattcaaaaaaggcaaatctatatggttcttgaataaagtcttaccatagccaaccgtgacagcatacatatcaggttttattttagtgaaggactcgaatgcatgcaatgccttcttggcattcttggcatctctgttagcacttaccatcaagtagtactttaccttgccatccaccaaacgtttcaacttttcattgattctccccttcgcatcagacttttcctcggtataaattcgctcaggactatacttgacatgtatcttatcctcttttacattgaaattatacatgatagaactcttcgagtagtttgataccgtcataatgacattatcctctcttttacggagtaaagccaatgctggctgtaacatgttataaccgtcctccaaaacaccatgccgacgaacgtgcaacaaccatctgcaaaatctgatagtagggctttttatgtcccaataaactttcttaccccttggtcctgtcgctctgtaatgaaacatatcattggcgttatgagcaagatagaggtttatatcattgttgtagaattcctcccaaacacaatcatgaaatacaaggattgacttgcaggtcagttcttccaactgaggattccatcctgcattttgcgcacacccgaagaagaatacatcataattctgtgcattgattgcagagatgccattttgtatgtcgacaaaatccacgtatttatggcgcaagctatccggacgcatttcagtatatgcaggcagatgatgactatcaaataagcaagtgatggttatgtcatcagtatgagccgcatgttctatcctatccaacaatgcataaaacactctacgagtatattctgcagcaccatttttctgatatatcgctaagaaatcgaaaagtattttcatcgtagtttcttccaaagtttacataacatggatgatttactgattttttggaaatcccaaagatttaacagtaaatacagataagggtagcggaaatgaagcttcgcctctataccatacattgcacatggtttcataatgccataacggagacattttgtgcagaacttgatataagtgaatgctcccttctttcgtaagaatatcagctcatcgtaaccgaaatagaagtagtattcatcataatgatatttgtgcaaatatgtattacgttcctttagcacattacaccatattgtgaatttcttcacactgacatcgcttgtcagacttcctttccgttctgtcagacagtagatgcaatcgcctgagacttctgctttcttactatgaacagcgattcttgtacaccaaattacatcctccgaaatgggtgtggtggcaaaagttatttgattgtcaatcaaaaattcacgtttaaccagtttacaccatggtgaccagatagagaacaacagattccgaacctcacgcttaccactgagacattcgtctataaaactacacaactgtgatgcatgatgacgttctcccttcttggctacctcgtcagacatacagctatcagctttaaataccaccacatccgaatctgaatagcggtacttatctatcttatcgaaagcatcattcataaggaagtcatccgcatctacacacaaaatccatcgtccttttgccatagagatagctgtattccgagctatgcccgctccaccatttttcttcaggagcacgcaatgggtgttggggcggtcgagaccaggaaaatgttcgaaatcaactttcgcaggatcgctgttatcatcaacgactattatctcgatgtcctctcgctgtggaatggaattcaaagcgcgttccaacaaatcgggtatattgtagtgtggtatgactatactatatattatctttggcataatgcattcgataaaaaaatgagtccttctactctcaattcgttcagctttgccaacctttcagaactaggttcgctgccaaaagtgcgaagcaaggagtttattcgggctgtacctctgtgggagtttcccattacgatgaatttcttattaaatatgatggagaatacgcaagcatggaacgagtctgtaataaccaagtcagcatccataaagcctcgcaaccattgttctacaggtggctgcacactgactttgtcagagtcccactcagcttccacattagcattaacggtaaaaggcttcagattgtattctttgagaatagcattgatttcctgttgcttctcttctgtcatatccagcacgtagcacaatagattgccacttgacttacttgtattctttatcagcactttgtaatcctctgcagttaggagcatagtcggatcagccacatgctttgtggttaaccccagttctcgcatgcagagttccacgccagattcctcacgtacagacaaataatcaaacagccggagcaatgccctaatacttacagtttcttctggcgtataatcccagacatcatgaccgaaagatggtgcataagctattcttttaacattccatgtcttcgcaaagcccaagaacgcatcttcgacacacttgaaactattcaaaatatactctcttcgccatatctggtcactacccacgacaaaaacatcataatcatcctcctttattgaaccaaggttgtccaactcgtgtctgtgaatatacttgtcggcaaatttccaagtattcgtatttcgcttttttcttcgcttgtaatcctctaattgacctataggagcaacattcttacgcaggatgaacttcattatcaatctcttaacagacacgctgaacggtatttgaacctttggcttgcgtattttatctaagacagaaacttcatatcccatacgctctaaggctgattgtaatgcatatgcctgcaacagccctccatagtttgtatgaagcggtaatgttaatattgctatcttcatactattcccaatttacgtttgtttcaactattttggctggaataccagctactatcgcatgagcaggcacatctcttgtaacgatagctccagcagctatgatagcaccattgccaatcgttacacctttcaatatggttgcaccttggcctatccacacatgttcgccgatgtgaatcggttccgaaatctgatattcctctttgatgattttatgtgcatcataagagcgaattacgacatctctcccaatggtacaatcttttccgatttcaatcgtatctccacaaattatctgtacattttcattgataaatcctccatgaataatcaatgttccactctcgatgacacgaatatacgaacctgcatacattcggaaaagtccattaacaatcatttttgagttgttctcaagcaggattcttgtctctattcgtgacatctcgacttgttttactcccatttcaaacttggagtttaatactaattgtgctcctttgtctatttgtacaagactgtatttgtagttttgaaaaggatagtcaaaagcccgtaccacttgatcagacgaaagattaatgaatttaaaggttttaatgtcggaataagaatagtgtaatggttttatgccttttttaaatttttgagccatgtagtacatatatccgagtttgagtttgattcgttttaatatactttcttttgtagactgttgaacgaaatatttttgtgcaactttataatatggtagtttatcaatgtcattaaagaagatttctcgattggtatcgggtctatttaaggaattttcaatagcaggattctctttaagtgcttcttcgtaagaaaactccttccattcaatttgctctttgatagattcaaataacttcatgccttttggggaattaatcataactaacgatgtacctttatcttggtccatagacgggtcaatgttttctataccccaaaaatcagccaacgtaatgtctgatgtccttggaaagcctttaaatcggcaagcaaaacaagagggacgagtgaatactccattttgaaggtaacctataaagaataaatcctgccatcgatttttgcaatactcttttccattggcaaattttacacgcattgaaaagttgtgccacccttcatctttcgctttaaatttgatgtttgtagcagtcgatttaaactctttttcgagcattttcatataagatagaaacactttgggcgagttaacgcctctacaaacaaaatcgcatgtgatgaggttttcataatcttttcgaaggaataaatgaagagcttttatttggcaaggtgtgccacaaaaaaacactaatttatcttgctttaataatgattgtatatggcgataaatgccttctgcattgctttgcaaatatttggaactgcgtatttgtgataaaagttctttatcatagcttatagtttgcgatacggtatggtcgctattataaatagcgcctcctacgtatccttgttttttgtatatatttaaagccaacattgaatgtatcccccccgatgtactatccattctaatatcttcatctttgctgtatgcagcaaaaactcgtggagtttgtaaatggtagtgtttttgatcgtatttaaccaattgtggacaggtacgttcgcacataccacagttcgtgcatagattagggtcaacacgagggtaccaaaatccttcccgatcgaggtgaaatgttatggcatgttgattgcatatatcaccacatgcattacatccacaacatttttccttatctataatgctgatcataaagtggctatattatttttgattatcagataacttctacagcaatgttttcattgctgtgtactacagctccccaatctctgtaccatataagatattttttgtcgggattcttttggtagtaacttacttcgaatgacaatacgtctctcacaatatcaaagtttcttgcacctattgagaagtctttcaatcctgcaacgaacgagatgtggtagcagcgtttggttaatccatggctggaaactttcagacgaactgtatattcatctttgtcttttggaacagggatcggtgcagttatgaatgattctaccaatacatcagcatcatctgtgaaatttacggtatattggcagacatctatattagtaatgttttttttaagcttaatttccagttctattggttcgttgttgcctacagtttttggatcattaaataagcgagcttccaaaaattcaatttctcttaaaaatgctcctttctcccttctttgtttatcattgatgatagtatgtgtgttgaaagaagatatattattacctatataataattaacgcagtcctctatacttcccgtataggctacagttccgttgttgagtactatcccttgtttgcaaagaactcgtaccgccgccatattatgactcacaaacaacaccgtcctcccttcgcctttcgacacgtcctgcatcttgccgatagctttcttctggaattcggcatcacctatggcaagtacctcatctactaccagtatttccggttccagaaaagcggctacggcaaagcccagacggacggtcatgccgctggaatagcgttttacaggggtatctacatagcgttccacaccggcaaagtcgactatctcgtccaacttgtgggagatttcgtggcgagtcatgcccatgatggagccgttcatgtagatgttctcacggccggtcagctccggatggaaaccggtaccgacttccaagagagaggcaatgcggccacgggcacggatggctccggtggtaggggaggtgacacgcgacagaagtttcaacaaggtggacttcccggcaccgttttttccgataatgcctactacatcgccttgatgcacatcgaaggtgatgtctttcaacgcccagacatattccgacgcgcctttcttgctgcggtcgttggtttcgcctatcttcagataggggtcttcctggcggagaatggtcgttttccaccagcggttgaggtcgtggctcagtgtgccggtgccgaccagaccgagtttgtagagtttgcctacatggtcaaaccggattgctatatcgttcattcttattctctttttttaattctgctgcttacactgtatccataaaattgcgttccacccggctgaagatgactactgcgcagaacagggtggagagcataaacaaagtgctatatgccaatccgccccaatcaagtgaaccacaccccatgcagctgtatttaaaggtctcgaatatgggtgtcaacgggttgagcgcgatgatgtcacggtatttttccggagctgcgtttagcggataaatgaccggagtggcatacataaatagttgcaggccgaaagtgaccaactgggtaaggtcacggtatttggtggtcagcgctgatatgatcaacccccacgacatggcatggaatgcggttaggaatatcaggaacggaaataacagcagggcggcattgacatgcagtgaagctcctttcacataaaaatagagatacatggcaatgaacaacaacagttgtattccgaacttgatcaggttggaggtgatgccggacaacggcacgactagacgggggaaatagactttgccgaacacacccgcattggcagtgaacacattggaggatacgttgaacgcggaactgaaataattccacagcatgatacctgccatgtagaacaaaggctgtggtactccgtccgttgagatacctgccaagccgccgaatatgaacatatacattacggtagtgaagattggttggatgaggaaccagagaggacccagaatggtttgtttgtatacggtgacgatgtcgcgtttcacgtacatatagtataggtcacggtaccgccatatacctttcaggtctatatccagccattttttctttggttttatttctattgtccagttttctttagtcatttttttgagatcttgttttttcaggagcatttgtccagatagagcacacagtgctgctgtttgtggtcgctccagggattggaaatcagtaggtaacgattcacttggaatgcaggtgaacagaacgtataatctattcgtaaaaaaccgccccagcattggtaactgccgctccatgtctgcccggcctggaggaagcaatcctgtagtaaccggctgattttccggtaagcatacgaggcaggtgtgtcattgaaatcaccgcacacgatgaccggataagggctctcggcgatggcttttgtcaagagatcggcttgccggttacgctggacggtgtggtggcgcatcgcctgaaatctgtctttcattgagtatgattcattcatgcctgtagtttgcagatggacgttgaataaccggaaagtttgccctgtcatctggatatccgcttgaagtattttgttgtagctgtttggaaagtagtactcttgaacgtttccgataggccagcggctgaagacggccagattaaggacttcatcttcccgcgagttgatgatgcaatagggataatcaggaaaagcagcccgaatggtgtcccatgccagaagattggtatgaggacgttcttgcagacagacgatgccgggttgcaggacacgaatgctatgggcggcctttgtcagagtgtctttgttcagcctgaacccttcggtattccagcaaaccaatttcagctgattggaatccagcactttttctttgtgcaggaaatgaaacgggaactgacatgctagaaccggcagactccccaataacaaaaacaagtaaagcatccaccagcggttgtgcctccagagcagaatcgcgaaaataattccatcggctatgcatataggaattgccgatagactgatgaggataaaatttccggcccactcgggagtgaagcaggggagaaatatcaacagcagtgtcagaccgcacaggatacttcccgacagacagttaaatacgcgcattgttggcaatcagaccttctaaagcttcgagttgtcttcgggtcaacctcaattggtcaagcatgggccggtaacgctccaaatggtgcaggtccgtacccacaaaatcgtatattttttgttttaacagcttttcgctgaccactttggggtgcgggccatagtaaccgctcagtgacatcagattgagttgaaagctgtaacctttctctttcagcagaaggtaatctttttcttccatgtacaggtaacgctccgggtgggcgatgaccggttgataaccggcattccatattttcatcaggatatccggcaaaccgggaggagggtacatgtaggatgtttcgaccagcaggtggctgctgcccaaaggtagcacttctccatccaacttgtttgtaaaagcggcatccatcatatattcagaagacagccgcagattcaacgggccggaataggctgccttcaacacgtcgaactgttgctgcagcttcttgttcagcgtgggataatcctccatgatatggggagtgagccacacttcccgtaaccctatggattccatatagcgtagcagggacagactggtatttatgtcgggtgaaccgtcatccactccgggaagaacatgggagtggatatcggtcatacccttcattaaaccagaattaatcaaattgtatttggacttgaatataccaaacatctttcttcttaaggtttcaggatttctttttgaacaatcgtttccagcttgattcggaaccatccacataaccgtagccatatccgtaaccgtagccgtatcctccgtatccgcttgtttttactatagcaccgttaagtactaacgacatattgttcaattgtccgctacggtatattttttccaactccggcaacatgcggcggtctagcttgccaacccgtaccacgaagatggtcaagtcggctatgcggttggtgatggcggcatcggccactactcctacaggcacattgtcgacaaagatatagtcataacggttacgcagttcggcaatcatcacttccaattgttcgctgagcaatagctctgatgggttgggtgcgatgggaccggccggaatgaaatctaggttttcacagatttcgttgtgcttgatgatttcatccgtcgtggccttgcctgccaggaaggaggtcattcctttttcttctgtatgaagacgggtatgtgaagtcaaagtccctttacggatatccatgtcaatcaggatgactttcttgtcggtttgcgcgaaactggccgccagattgctggatacgtatgtcttgccggcacccggtccgaacgaactgaaagtgacgacttgcatgttctttgacttgacacgcataaaatccatattggtgcgtattatacggaaggcttccgatacaatgtcacgcccctgggcacggacagcgatgccatgcgctgtttttttattctctatcttccttttggatgaatccttgggtatttcgcctaagaaaggaacggttacagcatcctcgatgtccttgcggttgcgtatgcgggtatcgaagaacaggaacaatagcaggacaattgccggcagggcgattcctttcatgacacctgccatgatcatgctgcgtccgttgggagaaatcggagcatcccctcctccagcaggatcgagcacacgggcgtcagtttcggtggtggcctggctcagcgcattttcttcgcgtttgttcagtagatagaggtaaagttcctctttgatgcgttgctgacgttcgatagaaagcatctgttgctgttgtctgggtatgttggtcacccgccactgggcttctccggccctgcttcgggcctcgttcagtttcacatcgatgctgacaatcatgttgtcgatggcccggatgatattctgtcgcatggcaatcagattcttgttcagttcctggacgatggggtttttgtcactgcttccttctatcagtttgtcccgtttcaacttgttggcgttgtaggccgctatctgggtttcaatgttgatgtcggctatgccggtgtttgaagggataagctcagtctctttggatgggtccactaggtagcccttgatgtagcgtgccatgcgtgcctgcaattccagttcctgagtggtcgagctgtactgccgtttgtctgacatggacatggaagcggccgaaccgatatcaataatatcattgttttgtttgtaagactgaagttcgttttccacgcctcctagttctttttcgatgatgaccaaacgctcgttgatgaagttggaggtattgatggctatctggttcttatctttgatagtctcttcattatacactgtaatcagcatattgagtacatcttcggcacgggcggtggagtaatcacggagtgacaggtagaggatggaggcatcattctcggcctgactgatgttcaggttgcttctgaacaggctggccattgtgtccgtactctgccggcgtatcgtaattggtgtattgaaccacttgtctgtataatataaggtgggtgagaccactatttttcctatgggcgattggatggtgtcacccagattggctgttagcgttatacttgtggcgtctgtcgagaaatcggataaccggacttgcttcctgttctggattctgactgtcaggctgaaatcaagatgatcctcttcttccgggaatgaaaccttgacaggggcttgcgtataaagttcctcctcacgcaagtcatccatgatgaggtagcatacattggcgtgaagacggttcaccacatcgcgcatgagtttgtgtgactggaattgcaggatctcattggatacattggtatatgaataggtgttaaaacggtccagcccgcgaccgatgttgtttgaataggcgtcctttatcatgacggtggctgaccgtgaatagataaagggaagtttggcatattgataccatgcatatccgccgaacagactgaccgacaatacaaaccagtaccatttggacaacaggtacatgatgatgtcaacggggttgatattgaatcctcccccgcttaaggtcttatctcccgacatatctttttgttcactcattcttatcatgtcgtttcttttttatttagtagtcagcaataccagcgaggtgattgtggtgatgaaggacaggatcatactccatgtgctcagttttctctgggcttgttcggtggccttcatgttggtaggttctacgtagacaatgtcattctgttgcaggtaatagtaaggcgacgtgaagatgtctttgctgcggatgtcgtggaacaggattcgtcgcttgttcccatattcgcggatgacggcgatacggtccagacgggatcggggggtcaggtctccagccatggcaagagcctctaaaagagtgatgcggtcgcctttcacttcaaaggttcctacatgtccaacttctcctagcacggagaatttgaagttcaagaaattgacggtgaccataggatctttcagcaattcttcgttgatcagtcgtttttttatcagttcggttaattgtcggcgggtcagtccttccacatgcagttgtcccagcacaggaaagtctatattcccgttgatatccactaaataacctttttctttttcatcacttaatacccccacttcattgttggaaatgcttccgtctgcttctacagaatagcttctgcttccggacatattgaaaggcagggacagttctgggtttttgctgttcacaataatactcaatctgtcatccctatggatgatggcttcatatttttgaaccataggatattcctgtagttcatccatatcttgtaaatagacaaaatctttgcgtgaagcgcacgaactaaaaatgattattgccaacagacaggccagtttgattgttttatccattgttttataattaattgttttttattcctttatatgaatcacttggtcacatcgttccatcagtcgtgaatcgtgtgtcacaaatattaatgtgttattctttccccattgcaacaaattgtccatgaggtgtgtggtggtctcggtgtcaagtgccgatgatgcttcatcaaacagccagatccgcccgggacgcaacagtgcgcgggctattgcaatccgttgggcttgtccttcagacaagccatatccatgttcccctatcttggtatctagtccttccggcagactgaacacaaattcagcgcaggccagccggatgactttatgcagagcctcttcgtctgctcccggactacccagccataaattctcccggatggtaccgctcagcaacgtatttccttggggcacatagacgaagttgatgcgtaaatcgggggtcacactgagtgtccgtccgtcatcagttgtcaaatcgatgcgtcccttttccggataaaccaaagccagtatcagccggataatggtcgtttttcctgttccggtaggtccggctatggcggtggaacttcccggatgaaaggcagctgtaaaccggtcgagtaccggctgtccctcttcatagccaaaagacactttccgaaagttcagtgtcagtggttggtctatgtagaccgggtgttcgtccggttctacatcttcaaagagggccattaaccgttccacggaggtccatccccgtatcagactgggagggatggatattaaccctaaaaaaggtccctgtacctgtccgaccagttgaagaaaggctgtcattgttccgaatgttatctcgtggttatgcagttggaaaataccccaaaggaatgcacataagtaccctcctccaaatgtaaatcccatgaccccttgcgtaaaagtggaaaatttgatttgttccattcccaatttgaacaacttctcttgtgtttcatgtaatttctgtttccggtagttggtggctccgagcgagcggactagaatccgtttggacagattttcttgcatgacggtacccatctcgctgttcatctttttttgggcacagctcagttcccggacctttctgaaataaatctttgacaataaaacaagaggggtgactcccagtatgaaccaagctaaacgcgcgtcaagaatccacaagtagataaaagagcttgccaattgcaagccggtaaccagcaggttgggtagaatgcccattcccattcccaacacttcggaagcgtcactgctgatacgggtcagcaggtcgcctgtgtgccatttccctgctcctttccatgaacacatcattagggcgtcggacagcgaattttgcatgcggatactgatgcgcatgttgatcttgccaaaaatccagggagatacaagttttatccccatacccagcaggaaggataaggctactattgtggctaccaggtaaatattcccttcctgtgctccggtagctacatcgatgatccatttggacatggccacattgaccaatgacatgaccactccgaaaatacccgaaaagatagagaaggtgatgagccaatggtatccttctgttacctgcataacccatttgaaagctttccatcctaactgacatgtattgctcagattctcccgtgtgagcttctgcaaaaattttttcagcaattctttcatttcttttttatcatttccttgaaacgtaagagggctaatccggccagccaccagaaagtttcgtcgaaagcataacctaacgataagtgcattttgtgaaagatccgcttcaacgtgtatcgtttgttcgcccatttcccggtgggacgttcaccgtaacgttcgtctccatgtccaaaattgccactttcccaaatctcttgcattaacttgtccggacagagactggtactgaatggtaaaaggtcggccggcacgccaagatattttatcaatagggcataaagtaaccggttccaccggtgaatgtgccatttgcgacagatacactctaattcgtttttgtttgtaacagaatgtaatgcgttaaaagccatggctatatcacacaattgtcgtagtccgatcccttcattgataagatgcttcaatatgtgggtggaaagtaatagatgattcgcttcgctcggaagtttgccttggctgttggtaaagacccccgcttcccattggcggatttctttttggaggaaagggttgtgcaactctatcagcctgctgtgatgttcaatcagaactctgtttatcagacaggaagcctcaccattggttcctctttttaccggtaatcctaatttttccatccgttggttggcttgttcggtttgtgtcttgtttccgaaccacaggtcgatgtctccggctatgcgatgttccggatgagggtagaagtcagctgtccctatcccttttagcagcaggaaagggatagaaggtgattgtacataaatctgttggagggctttaatcgtttcccggtgttgccggttcacccgttccaaggtgtcaacttccaccatccagccaagcaataccttccggggaggtacggcttcagtcggcaacaggcggatgccatcgtaaataatgccttgtacggtttgttttcttgccatgctgtgaatttcattccattccttttcatctagaggaaaaagggcggaacagtcttcctgccggtcccacagtccttgccttagcaaaagcatgaaagccttttgtaatggggctgagatcatctttttgtcttattctatggctaacccagtttctaaccattgtcggcacagctcgttggcatcgtttcgggctgtatctttatttacttcatattcattgcacagcagtgctccggcttcatctaccgtgaattccttgttttccaattgtttccataaccaggcggctgtttcattcaaggaatagacctgtgccatatccatggtttcagaaaacggattgacaatcatatattctccacctacttggcgaagaattaaattagaattgagtctcattgtctttatattattgcattatcctatttatagttaaaattacatcgaccttcacaggcagatgtaatggggaataaaatgtaagttcattctattatccgctgataacatagggtcttgaacttacctgatctaacattttttacagatccggcgcttctcgcgaagaaaacgaatctctcttctaacatttcttattgtattgtttgtcatatctgaattgaacagattactgtttaccagtttatacctgtgggacggatcatgccggcttgcagcagttgcatgataaatcctgcggcatcttgcgatgcggtgtctttatccacttcgtattcctccagaatcaacagtactagatggttgaagctttctgcttcttcgatatgctcccagataaattctccggtttcggtcagggtgaccattccgttgaactctcgggcggtctgtccggaaggaaccagtacgatttctccggctatgtttcgtttgataaattctttggttcttttcatcttttgaaaaaacgatatgttttaatgatggtcctgcgtaaaggaattatgttcggccatatgtgggcgaagaatttccactggaaatcttctggaactatccatttcccttttcgcttcaccttgataatgatggcgaaaatctgttctctttgaattggaccttcgatgacagtctgggcgtcaccgataagataatattcttcatttttaacattataaatacggtgcatgacatattcaccgttgcttcgctgatagaacaccatatctcctttccgaagttcaccggaggggcttttcaggtagatgtggtctcttgcgtggatcaggaatggagccatgctgctgcccgagatgatcatgctcacctgctttccttcctcaatgagggtacgcagcatggatatatattctttcgtatcgacagtcttcataatggggcgtatttcacattatcggataatttccagtttggtcagatacctgtgcagggtgaaggctgcttccggattcatgttgcatgcataggtgctgatgcttgtctgtctggtcaaaacctgcagatcgtcgagtgctttgccggtgagctttggattccaccagttgattgtaacctgcgagcagagagctttgaaatgcttcatggctgtctggggacggatggtgttatcagatgcctgttcgatgaatacaatggcctccaacgggcggcgttcattgtgacagataccgctggaaccgcatacaggccatcccgttatctcgtagtcgccgtttggaagtggacagagcagggcacggtcgccattgagtacctgggtgccgggaatatgccggcaccacaggttggcatgcgtcgatttgccaatgccgctaggaccactgaataagatggcttgcccacgataatccagaaaagtacaatgtagtatgtaacatccctggacagataaaggacgttccaggcacaggcaggaaatgaacagggtatctgtttgcagttctcttttcagaccttcgatgaaatagatgttggcatctctttcgtttctttcctgatagagagcatagcaggcattcaggtttcctacagccagcaggcgtgtttcttgttcttctttccggaaaactacgatgtcgttgcgttggaatgtgatctgccagtcgttggacggcaaaggcagacggttgacaaaatagaatgtatagtaccggtccgcttctttggtagcgggtttatggtcgagaaacaaacggctgttaacaggaatctcctgttctgtcactcctgacaattcaatcgttagcgggccgatattcagtctcacaatcttcagtttttaatgtattacggggggataattcgtaatgatccgttctttggctttcgccatctggcaaagatagtccatgcttccggtgattgttttttcacagtgtgcggcggcatagcatacgttgcatacgggacgaaggtggcaaccctcgcattcggtatgggataccagttccttggcttcttctaaaagttgttgccatgcagttgtcatcggaatctttttcaggtcaacggccggttgatccagcatcacacagggggtgaggatgccttgccagttgatccagcatgaactcttggcagctctgcactccaaagagcaggctcgtgttccttccacatgggcaagcgtatatttcaagtcgtgcatgtatcgtgccatgtcattcccttttttgtactccatatattgcatctcgatgcgggccgcctcgtcggcatccagtctttcagttagaatgttacgcagacttccgcattcggggcgtgagagaggaaacatgtatgagtttacttctgccggaatgtccagatgctgggccagacggatgatctcgtcgtaatctttttcattctttcgtacgatacttacgttcagtttcacatcaatgtctgcctttttcaaccgtttcagggcttccatgcacagggtgtatccttgcggattgtggcacaagcgtccgtaagtttctctgctgtctccatacagggtgacgtttatccgccgcggcttgtgggtctgcaagatgcgtaccatttcgttgtcgatgagtgtgccgttcgtattgagagtcaggatgaatcccatttcgcgcagccgggtgtacagctccttgaagtgtggatagagcatcggttcacctccggtgagaaggatgaagagtgtacccatgtcttgaagttgttctgcccagtcgagccattgttgcaaaggcgataaacctccgtgtcgttccaccacgctgcgttcggtgcgtatgaagcacatgtcgcagttgagcgtacaggtgggagtcagctcgaagttggtagtgatcgggacacggctctgattggctttgtccaccaatgcccgttccaaaaggttggcatcgtgaagatgatccataacttggaatgtatatgtatttatgagaaaagtctttatagacttcctttcatttgtttctttttactttttgcaatgcggcaaaggtagccgatgccgccgcattgccctttttcattgcgggcattggcatagcagacatcacagatagagcgtaaggtacaacctgcgcattctttatggaacggaagttgttcgcatttggttactatttgtttccaggcatcgcttacggttgtggaaagtagcgaaacggctggtgtttccatatcgacgcacggagtcatgacgccctgccagttgatccatgcggaacttttacctgcccggcaggcaagtccgatgccttcagcaggtacgggagattctccacgttccaattgctggaggacatgagtggcgtatgatgtgtattccttgccatatttatgttccagtgcctcaacctcggcatgtgccacttcatccggtacggggcggcacgtatcaaggggtagcgtggtggcgcatcccggccgtgaatagactgaaatgtaactgttggtcagcataggtaagtcccattcgtcagctagttccagcatttgccggtgttcttttatattttgtcgtgtcaaggtgaggttcagtttggtatctatgccatattcttttaatcgtttcagtccttccaggcaacggtcgaaaccgtttgtcgcgtggcacagattgagataagttccgttggtcacaccatataacgagacattcaccctccggggtttcaaacgttgaaacagacgtactgtttcgtcatctatcaaagtcgcgtttgtattgatggtgaggatgaatcctttttctttcagccggatatataattctttgaaatcaggatagagtaggggctcgcctcctgtcagtaagatgaagagcgttcctatttcctgtagctggtcggcaatgtgcagccattcctctatgctccgtaatcctcctcttttctcggcttgtgacttctccatgcggatatagcacatatcacaacggaaattgcacgtcggtgtcaattcaatagtggcattgatcggagtacggtttgccgtcgctttgttcaccaatgcccgttccacagggtttatgtcttgcagggattccactaggataatgattttttttcaaagaaaagtttttgagtctagtgtattggatttcatttacttccgtggtcgtatatgttaccgaaatttgtctcgatggaaaatatatagattatcttccctttttgaagctcaacaaaagttaatacttaatttagagcatatcctttttataaggcaccagaattggcatctcacaaaaagatattatcaaattcgattgatttttaactattggcatacaaccaagtctatattttacgatgatagacccaaagatagggaaagtagaatctttcaaggtcttcattgctttgcataattcgtaaattttgattcgcagcgaagatagatattttagaaccctaatttgagaggtttacagtatagactttacttttaaggtccaagtctatactgttatttgatgcgaatttcataaataggggaatgtcttaagagtggttaggacgacctggtatttcttcaacagcagatttgatttcaccccaaccttgatgattgtattctccagtgttatttactgtatcatagctagtccacttgatgcctctaatcttgtcacctacttttgcgtcacttaaatcgaatccattccaatcaatattgagaataggtataccccatttttctatagtcccttcgtgccctgtagcatggataccattaatatctacataggttgtagcgcatggttctccatgattgtttgtattgttttctccataatgacaatgaaatagtgctttaaagttatagcatgcagctacatattcgttcggaatgaactcttcgctaataagcatcggtttttgataatctttcttcatactatttttttcttttttgattcctgtttcggaggaaaggaaatcagaaaaggtttgaagcgaaatagtgattgggtcccggagaaactccggtgtgaaagaattttgaaataattgatatattgcgatttaccatctacaatatgatcctttcattttccttttcattacactaattctttgcagctcaaacgatattctgacttagttcctccagtagtctgatcatatattatttaatctctatttctattaatgagaatcaataaatttatctaagcgttaggaatcaagattgaaataaatgaataagattgctatttactgttttatttaccgattaggatttagcagtttcccaagaatttatgtcaaggttcttggtggcgtgaccctcccagcccttttgtcctctccaaacaatgactaattcacttttctcaaatatctgattatggttgtaatcaacatatccccaataaaaaccagattgggcttcggcttcatgaaatgcactacatggatgatagtttcctagccaaatacctcgatttcctatagtgggttgtgaaccagaagcaggcttatctctaaaataatacaacgttcctcttggtgcatcacaagtaaacttataaacagttccactatctccacaagcagccacatgcgtttgcggcacgaaagcctcgcttttcagctccggctttgtataaactttctttgtcatcttttttttcttgttttgccagacttcttattctgtaagagggcaaaagtttgaaaagagaaaaacatgaccgagttctgcaagaacttggctatatgaaagtttcatagtaaagagaaaattgtaagatgttaggaatttggagatggaacgtgaacaagccgaaagcgacatgtcacatccggatatttatctccgtaaatcggtaaagactgtaaatcacagtcgtttcatcctttttattcttgattcttattgattgagttcttgcagaactctgtctgttattaaataaattatctatctcatactccgtatcgcatccgctacacgcatcacatcctcgcacgtcatcattgatcccgaaggcagacagagtccacagttgaacagggcttccgatactccgttgacgtaggtgggggaggatgagaatacgggttgcaggtgtaacggtttccaaagcggacgggtctcgatgtcggcttttgccaagtgctgcatcagctgcaaggcgctgaaactggtttcgttactgtccactttaattgtagtcagccaataattgggtagaaacatggtagatttcttgggttctaccacagtgatacccggaagtcctgccagcagctcggtgtatagccggtggatggcacggcggtgtgcgatatggttgtccactacacgcatctgcccgcgtccgataccagccgacacattgctgagccggtaattgtatccgatctgttcgtgctggtaccaggggaacggttcacgtgcctgggtagcatagaacttcactctctgggcttcctcttccgtatggcataataaggcgccgccaccgctggtggtgatcatcttgttgccgttaaaagagaaaatcccatattgaccgaaggtcccgcaatagcgtccgtcgtaaacggcccccattgcttcggcagcgtcttccaccacggggatgccgtagcgggaggcaatgtcacagatttcgttcatgcgggcaggcgtgccgtaaaggtgtactggaagaatggctttgggcttgaggccggtctgtttcatacggtcgcagatggcctgttcaagcagtataggatccatattccaagtatcaggctcactgtctacgaaaatgggggtagcaccctgataacaaatggggttggctgacgcagcaaaggtgaaactttggcagatcacttcgtctcctttgcttacgcccagcatgatcaatgccaagtggatggctgccgtacctgatgataatgccacggcgtgtacctcctggtcgcaatgcgttgaaagccactgtgacaagtcatgctcgaagccatctacattcggccctaagggaactacccaattggtttcgaaagcctcacggacgaactcttgttcggatccgcccatgtgtgccaatgacaaccaaatcttactcattttcagttatgaacaaaaaattatttgttgcgtgcttcggtgatgaacactacaacacggttccactcgttcttcagctggtatggttgcaggctatcacctttgtaatccacccggatgcggcttggatccacaccgaactctttcaccatcatgttgcagacagcttcggcacggcgctggctcaatttcaaattgtaggccggattaccagtctgtacgtcggcataacctgttatgatcaggttgacttccggatggtcttccaaatacttggcagcttctgccacattctttttctggatatcggtaatattgtacttgtcgataatgaatgatacggtcatacccaacatttcgttcttcactacctctttcttcacttctgtgacgactggtgccggtatcggcttgttacgctcttcattgatcttgcggttcaattcgtcaacccatgcctggtcgttcacctctgtgtagcggaagcggcgatcgccgtactggtccttgaaatgataggtgagacctaacatgacgttggcgtatgaatcccatttgcggtcgtaacgcgtaccgttgaaagcatcgtccgttgcgttgaaggtcgcttccagattgatgtcaagcgcattgctcaacatataattgaactggaggcctgcgcgtagagagaaaaacgttttgttgtcagtgctgatttggtagggggcaaactcctcactgggggatttgtcccactctttgactttatcatcgaatccgaaactggagttgaatcccatacccaagatacctactacattgaaacggatatcttcgtcatattgggcgaaaatattgtgcaggttgaacaatccgtccaaataaccgttgaacatattgaaaccgtagttccctttgccatacacctcgggaaaggcttcaatcacttcgctgttggcgcgtgacatttgtttcaaataagcgagttgcacacgtgctccgatggcgggtgagaagtatttaccgaccgagagggctatgcttggtctggtcatggcgccgaaagatccgaagcggctgttctcggacagcgaatgattggcgccggcctgaattccgatgaaccagttgtcaccggccttgtaatgctttagcgcccgtacagtgtcggtctttaatttccaagttgcatcgtcttctattgtttgtgcccataaagatacagaacaaaagaagaccacaaataatatagctatttttttcatgccaaattatacttttaaaatgggtcgtttattcattgatgtacactatgacgcagctcttttgtggatcgagcgatgcaatgacagcagggtttttctctataaaaatacgtccggccggaatgtcgtatgtgttggctagcacattgcggatggattgtgcccgtgccatgaacaattcggtgtctcttacttctttggttgaagtgatatagaggtcgccatcggctagcttctttatattttctgctgctgtgtaaacgtttacttcctgtagtttgttgattgcggcggaagcattgtcaaacgagataaacgaacggatatgattgctttccaccacttctgtctcaatctttgtgacaggaggagctgccgctttgttggcttcacgcaggcggttgatttcggcgtttgcttcgtcatatttcgacatgtcgtggcgggcgtaggtgaattgccgtgagccgttatgatttttgaaacggtagctgacacctgccaatatgttgacatggccatcccagcggtcgtttgaaccttcgccttcccaaccgtcgaatgagtcgtcaagcaaactgttcgtgatttcaagattaaagtcccacgctttaccgaggcggaatttcgccatcagacccaggcggatggacagcaggtcttgcgattcggtattgtatattccgtcgttccaggtacgcttgctgaagttggcggtgtgttcgtaaccggctcccaagataccgatcaggttgaaggtccggtcttcttcatacccgcaaaagaggttggtgaagttgaacaatccgtctaggcctacccccatggcgtcccaatagtagggcttgtcgttgcttgctcgtccggcattgcttccatagaaaccttggaggcggatacctccggcaggagcgatccacttgcctatggacaacgcaccggcgggacggaactggtcgaagaatccagaactggaagtatgggtcccccaggaataaaaggcgccggcctgcaatccgacaaaccagttgtctctgaatttagacttgtttaagagccgtttgtccccgcttgcagggtctgtccagtaagagatctcctttgtatcctgtttgacaggaacatcttgagccgcttcttgtgcaaatcccgtagccaaggttagaaatggcatcataaacgcaatgaaatgttttttcattttgcgattcattttagttaaacattatattggatttcatttttttggatatatatgttttttcatccagcgcctcatatacggagttcatacttttgaactccggtacaatttgcttcaactgatatacggtctcttttttattgtccgtctgggcaacctcaaccaattgttgcagggcgggctttattttatcgtaatcttgttttaaactgatacctttgaatattttcggattaagggtaggagtagagttctcttcattatagagtaattcctcatatagtttctcgcccggtcgcagaccggtatagacgatttcaatgtctttgtccggttgtaaacctgccagttttatcatccggcatgccatgtcggttatttttacgggtttacccatgtcgaaaataaagatatcgtttccttgtcccataaaagcggcctctagaaccagtcggcaagcttcgggaatagtcatgaaataacggatgatgtccggatgcgtgactgttacaggccccccttccataatctgttggcggaaaagggggattacactgccgttgctgcccagcacattgccgaaacgggtggttataaaagaggttttaccaattatatttccttcttggatagcactcccgaggctttgtacgtacatctctgccagtcgtttggtagcacccatcacactgctgggatttacagctttgtctgtggagatcatgatgaatttctttacgccatatttcaatgccgtatctgccatgatgcttgtacccaggacattggtacgtaccgcctcgcatggatatttttccatcatgggtacatgtttgtatgcggctgcatgaaagatgatgtcggggtggtagagtcttgtctgcgactccacacggtcacggttgcgtacatcacctatgataggcaggatggagcggtctggaaatcttttcttcaactccatatctacttcgtaagtggcggtttccgaaaaatcaaacaagatgagctgcttcaggttgaaacaacataattgtcggcacaattcgctcccgatacttcctgccgctccggtcaccatgataacacttccggacaattcattgcggatattatccaagtcgatgtttatttcttcccggcttaaaagatcttctatctgtatattgcgtaattgtattttactccattgtgtttgttctgtcaaaaatggtgcaatgcgcaggcagatgtggttctccagaccgtattgcactatttcttcatcgttacggagatctgtgtggcttagaaataatatacaattgacttttaaggtgctgaataattttcgcagactattttcttcgtcaattaaatatatctgatatcccacaagccggtatttcttgttttcgggttttcgggtgataaatccgaaaacattataaggattgttttcacttcgtagataattagccagactgattcccctttcggagataccatatattaaagttgcttgtctaggtttttttaaaagctgtaataaatgatagtagaaattgacggttaatatccgtgtacacatgagcaggaaaacggaactgataaaatctgttataatgatggaataaatgaacaatccgatgtaatccagtgttatatatgcaaacaaaacaaatgtgagagctttcagcagcatggcataaatgatacgtgtcagttctactaaggtggaataacgtataattccctcgtaggtcttacaaattccagtccatacgatactggaaatgaccgctatcagcagaatataacgctgctggttgaaatggatgctgatattaatcaaatagtggaaaaataaaaagatagaaaatgaggatatgacagataaaaaaacatcgatacaccatattatatagggatgtatataatctgtctgcaaaaatttattgcgtattttattctttaatagggaaagcataggtcgttaaggtatttttttcaagaaggcttgcggaatataagaggtggctacagcacatacaccatggactgttataataagccggtggttctttttaatgcggcagatatacccttctgcacctttgaatgttccgtcaatgacttttacgtggtctccttgataaaatttaggattatctgtgtcaaaatattctagacctttttcgcctgacgaggtaacgagcatgaagatgttcatctctctctcgggaatggctaaaggaatttttttaaaatctatttgccgagtatagagaattactttatcggtcaagatcttctgtatctcttttgctatgtaagtttccgaatggaagaaaagcaatgaattgataactggttttcgtacgtttttttttgttccatcttgttttaaaacctttacggtttcgcagggaatataacattttatctttttcttcaaaagaagttcttcaatggcaaaaaccttattatagaatacttttaatgcaaaccagtgttttttcgaattattgtttgatgtcatttttatctttaatacttcctcaaatccgcaactacgcgcctaatatgatacagaagcgaaaagaatctgcatcgttagtaaaaagggggcacagtgcatcgaatgtcaccataaagacatataaatgccccttaccccaccatgcgacttgaggcaatacgcaaaatcacgactataagttgtcggtgttatccaaagtcattctggaacacattggcataagcattgttgcatgaatagatattcagcacatacttccttgatgtcctgacccatttggctggcacagagatgaacttaaagacaaacgtcttgatgcggcttgttgctttgagtccgaacctcttcacgtcaagcctcgccatgatgaatttatagaagttgcgtatgagtgccataagcagaagaaacaccgtgttttctcccataaaggattttggaagcctgttccagccgaatccgttattcatatcatcgaagatgcgttccttccctccacggaggttatagaattcgacaatctctttctcggaagactcgtagtcatttgtaaggatgcagcggtaggtgtattctccttcccacaggtcgagttcgccgtctatccgcttctgtctttgaatcacaagacggtatgccttccctttccatttctcgatgagaatggaggccagctcaaactcaatgccgcccaattccactttcttccaacctctgagggcaaagatgtcattgtagagcgaactgcatcggttagcacggatatagaaggtcttgcagtgtttagcaatctcttccactatctcttcagaacacgagccgcaatcagctctgaaacggttgataataagcttgttttgttcaaacctttcaaagaacctcttcagcgtgtccttctggtggaaacggacatttgtgttgccgtcgctgttctcaatgccgacaatcaagttgccaataaccgccacgccagggcgataaccaaggaacttcttgtatgtaggcttcgcatcaaacttctcagcctctatgaactggtggtcgaagtcaacgtcatacccctcgccctctttcagctgccctgtggacaataggcaattgaggagcagtgtattcagcttgtctgccgtgttgaagtcgtaggtcttgccagtgtcggatgtgtaggaaatgttatcctgggtcagttcctttatggctctaagaatcgtgtcggcactgcatgtgcgaagtgtcggatgaagcgaaaggtggtacatcagatgagtggtgacatcctcgatgcatgagccgccacaaaaataaacgctcataagcgaacggatgatttcgctgtattgataaccatacagcctgcatctcataccgagggttgagtcgattacagatgagagtctggagtcaaattgctccattattgaaaatattcctccaaaaggagtgagtttctcggatttaattgctacctttgccatgtctgtcgggtttgatacatattttgatttgcaacactaagataggtgaaaaatctgacatggcaaattcctgagcaactttttgttgctcaggtacttaaaaagttatatttgtaatagtgttgcggaattaaggtactttaaaaatggaaggacattccttccattcctgcatgttatataacacacagtaatcagagttaaactaacttttttctataatttgaaaactttagcacgcagcatttttcctgatccaagaaaaataaactgtaactccaaattcatactgtctctaagtaagagatggtataatattataatgtgaatataatcagcatgataggatatacctaccaagctgatttttcaaacttttgtaacttgtctttagcccttcgttttttatttttaacaacttattttttatttttattttgtaatgttattgtatttaacaatttttctatcatagtatcgtaaagtattaaatattagacacaagcataattattatatatagatagagaaaaaaaatgttatctattttgttaatcaataaaaaacaagtatctttgcatcgaatttataccgtctcttacttagaactactgttttatcgaatcgataatagctttatttacttcatctataattgaattgtctatctttgtcaaataaatcagtgtggttttttccgaactatgtcccatgcctgcactgatgattgacaaaggtacatttttattgcgtgcggttgtagcccaggtatgtcttggagtataagaggataaattaatattcggttctaaaagtttggaaagacgtttcagttggcgattatagtaattgagcgctatttcatattgtgagtaggctttattctcatcttctgtatttaatatcgggaacaaatatggtgagtcttttttttcatactggttgattatattttgtagtctggtttcaatccttatagttaattcttgaccagttttatgtctgacgtaggtaatatatccattctgtatattcgatttttttaagtagacgatatcgacaaaagccattccacgagcataaaaactgaaaatgaacaaatctcgtgcaaattgcagagccttggacttttttaggtctatggagagaagctgagagatcaccgtttctgtaacagcacgttttcgggttctatccactcctgtatagacgtttttgaatggaaaagtttgttctatgattttttgggttacagctttgttatatacagaacggaatatgcgcatgtagaatgaaatggtgtttcgtacaacaccccgttgaattaaaaaggtgttgtaactttccacaaattgttcagttacaatattgaacgttgaatctgtatttttcataaatgccttcaggctttttaaggttttgctgtaattacgagcggttcctcgtcgattgtcatttttcagcttttgaatttgttgggtgaaaaaatcagtaatactgtaatcggcggttgtttgatagaatttttcaattatttcattaactgtatagtttgcacattcagcatctattttgtagatgattttttttagccggtctaaatccctgtctattttacactgaagtaagtatgaggttgagtctgtgaaaatgatttgtgctttattgctatcccaatcttgtggatgaagatgtatcttcgtagtgatttgtttaacctgacgaagatgtgtcagttgataatagatagttccggccttacctggaacagttgacggacgtaattttacttttacagttgccataattctttacaattttatttatgcaattcatttaattaaataataatagttgaatatactattttgccctatttcctgttgctaagattgataatcatctctcttgcttcagtagatcatgtctttctaggagtcggactggtataatctgagaaatagggtatacttgccttctttttatttaatttttaccgtattgtaatttgtcttgaagaaggacttgaaatattgaaccatttcgatccttgtatgttcatctgatgcagtataattaggaataagtcatattacgcaaaaggatatggtatagtctgcaagcgtaaacggtataactcctggaaattacggtattagttttccaaatctatgctgttagtttgaaaaaacgttgaggactgtcggggaaaattttttcttttttgggttaggagcacggttgaatttttaaaaaagaattatatttgtactactcattaccgaaactatggcaaagaataatttactaagtgagcaacttgcttatattggtgtcagttgtactcctacgcatctgcatttgtgcagttataatgctgaaagtatttgtatgcaggatgggaaagatatagatagtttaatcccttatttgaataagaatgctataaactggatacaaattcatggttttcagaatacggaggtcatacagcatgtctgtcagaattttaatgtcgactttttgacgatacaagatattttgaactccaaccatcagactaagatagaacagcatgatacatataatgtagtgattttgaagttacttttttctaatgatgatggctatgtgccacaacaaatagccattgtgcaaggtggaaattatctgttgacctttatggagaaggaaacagactttctgaatgatataaatacggcattggaaaagaatgtgttgaaaatacgtaaccggcagtctgatttcctgctcagtgttattctaaacagtgtgatggccagctttatatccatcatttcggaattggaagatggattagaggatttagaagagcaattgctttcaccggaacagactgatatgcctggtattgaaaatatacagcaataccgccgtaattttcgtgtaataaagaaatgtattttaccattaaaggaggaaatcagcaagttgttgcatactactgataatgatctgttgcacaaagcaagccgtcctttctttaatgatgtcaatgatcatttgcagtttgtattgcaaactttagatggttgccgtgacatgatttcagctttggtagatatttacctttccaataatgaccggcggatgaacagcatcatgaaacagttgactgttgtttctactatatttattccgttgacttttctagcaggaatctggggaatgaacttccaatggatgcctgaactggggtggcggtatggctatgtatttgcatggacattgatgttaatactagtagcagttatctacttctattttaagcgtaaaaaatggtattgatgggagaggatggatgggatttacttaaatgtgaatcccatattcatgttttacttcattcattacaaaggtgctttccagtgagcccaaactgtcaatcgtacccaagacattgaggataaattcctgataatacttcatattaggggagtgtattttaagcaaatagtcataactgcctgatatgttgtagcactctgttacttcagggatatcctgaattattcgtgtaaattccgcagcaatgtcccgattcagtcttcttagtttgacactgcaaaataccacgaagccttggtttagtttctcagcgtccaatacggcgatatatttttttatatatcctccattttccaatcgtttgaggcgttcgaacaccggagtggaggaaaggcttacccgtgcagccagttctttggtggtcagtcgggcattttcttgcaaggtacgtagtatctgcaaatctactttgtcaagtttctctaaagtactcatagaataatattctttcaagaggttgatattattttcatatctgtcaatacaaatatattgcatttatcttagattccggagaatttttcgggaaatgtagtacagagttatattctttttttgccagagaatgcaagaaaaaggcagaatgattttatctctcaaaaatactttttatctttgcagccgctatgacaaagtatatatatcttttttatatcttgttaggtgtatgtctgttggcgggctttggttccgcatttggtagcggacaggagcacgatgtagttcgtacagttgatttggaaaacagtgcggtggcgttgtgcaacatatctgaaagcaataacgggcaggaaaaaaaagagataaataatgaaatctaccatttttataaagtcggtatcggcggtgcagctacttctttttcttttcgcaccttgtgctcctccaaaattctgcgaactcattcctctgcttccgtcatagccaagttggctagattcttgaaagtacttcttcctgaagaaaaacaaatttctttttcacctattctttattttacccaatattccagtgaatactatatttatcagttgaggcgtattcttatttagcttatttttcttttcggcaaggcctattttttttatgccttatatttcttttgtttttatattttcataatgggaactggggtggatgcttgttccttttatgaatggtgttatatgttaatgtattaataactaatgtataatggaatttttattggactttatacttcacattgaccaatatatgatagatattgttcaagaatatcatacttgggcttatgtcatactgtttataatcattttttgcgaaacgggattggttgtcactccattcctccccggagattctttgctttttgtcgcgggagctatttcggctttgcccgatatgcctttggaggttaatattctcgctttggttttatttatttcggctgtgctgggcgattcctgtaattatatgataggacacttttttggacgtaaacttttcaataatcccgattcccgtatatttaggcaaagtcatttggaaaagacacatgaattttataaaaaatacggaggaaagacaatcattattgcccgttttgtacctatagtccgtacatttgctccttttgttgcgggtatgggtaaaatgcattattattattttatggtgtataatctgatagggggaactttgtgggtcggtattttctgttatgccggttattttttcggcgatcttccatttgtacagaagaatctgaaattgctgattgtggctattattgtcgtttctatattgcctgccgtcatagaagtaggcaggaataagtggaaaactcgcaattactaaaatcaaacatatcaaaaacaatttattcaaattacatttatgaaaaattctttttttagtcgattcacacctcaggaacctaagtttttccctatgttgaaacgtttgtctgaaatcctgacctcatcatcggatttattggtagaaagcatgcagcatgataagccggaagagagagcgaactattataaacgcatcaaagatatggaacgtgaaggtgacaagcagactcatttaatttttgacgaattgggaaaaactttcataaccccttttgatcgtgaggatattcacgatttggcatcgactatggatgatgtaatagacgggattaacagttgcgccaaacgcataacgatctataatccccatcccattgctaatagtggaaaagagttgagtttgttgatacagcaagcggctgtttatataagtaaggcaatggatgaattggaaattttccgtaaaaagcctactgaattaagagcatgttgtacaaaattgcatgatattgagaatcaagcggatgatgtatatgaactctttgttaagaaactatttgaggaagaaaaggattgcatagaactgattaagatcaaggagataatgcatgaattggagaaaacgaccgatgcggcagaacgggtagggaaaatcttgagaaacctgattgtgaaatacgcataaaagcagaaagtacaacatggaattattagtgattattattacgttggctttgatttttgactatattaacggatttcatgatgcagccaattcaatagccaccattgtgtcaaccaaggttcttactccgttccaagcggtgatatgggcggcattttttaattttgttgcgttctttattgctaaatgtataatcggagggttcggaatagccaatactgtatccaagacagtagtggaacagtatatttccttgccgattattctttcaggggttattgcagctattgtatggaatctgtttacatggtggaaggggattccttcttcttcttcgcatacgctgattggaggttttgctggtgctgctattatggctcatggttttgatgccattcagctcaatattatattgaagattgctgcttttatctttttggcaccatttatagggatggttgttgcctttggattcacgttgcttgtcctccacatttgtcgtcgtgcacatccgcatacggctgagatgtggtttaagaaattgcagcttgtttcttcggctttgttcagtattggtcatgggttgaatgattcccagaaggtaatgggtattattgctgctgccatgatcgccgctcattcggaagggttaggaatggggataaatagtatcaatgatttgccggattgggtggcattttcttgttttactgccatttctttaggaacgatgtcaggtggatggaagattgtgaaaaccatgggaactaagattaccaaagtaactcctttggagggggttattgcggaaactgctggagcatttacattgtatctgacagaatatctgaaaatacctgtaagtacgacccacaccattacaggagctattatcggggtgggcgctactaagcgtctttcagccgtccggtggggaataacaagaagcctgatgacggcttgggtgttgactattcctgtcagtggaatattggccgctgccatttacggagtggttggtctctttttaggatgaccggattgtaggctgttctagaaaataaagatctgccgtgaccgaggtgactgggaagctacctcggttttgtatatgtacctatttgtaggtaaaaagtggatgaaacagataataaatataaaatgttattgtgattttgttatttgtttctatttttgcagtggacttactgaacacaaaaatgagagaaaacgcaaaaggcaggatttttatagcatggctgttgtttatgacgcttatgccatttttcatggtgaagacttttcactaccatgaagaagatgctgtttgccattctgatagtggaaattctcatgactcctctcatcagtgtcccgtgtgtaacttcacactttcaccttttacgcaagttgaaacattacaacttcatattgttcttccggtttttgattatcagccggaaataacggtggataaggtttgccaggttaaatcttatccttattatctacgtgcgcctcccgtttgctgatttacataatatcttttatttattcacaacatcaaatgattgtaatttatgcgtatcagatatgtttcgggtacgctgggaatgttttttgccttgtattcaaatgcacaggtagtttctgatacgattaaaagtgtagatttatccgaagtggtggtgacgggatcttaccgacatgctcaggagaaaaagactaccctgacacttgagttgtttcagaaagattatttgaaccggcattttaccggtaatttggtacagactttgaaaaatgttcccggtgtacactcgatggatatcggtgcggggttctccaaacctatgattcgtggtttgggattcaaccgtattgccgtatccgaaaatggaataaaacaagaggggcaacaatggggagccgatcatgggctggaaattgatgcttttaatgtagacgaggtacggattctgaaaggtccgtcttcactgttctacggtagtgatgcgatgggaggtgtcatcgaaatccttcctttgctgccacaaaaagagaaccggttttttggtgaggctgccttattgggaaaatcagtgaacggcactgtgggcggttcactgatgctaggtattgagaagaatgcatggctggtcagagtacgtttctcagaacagcactatggagattatcatgtaccggcagataccattgtatatcttacccagttggtgcctgtttacggtcataagctgaaaaacaccgctgggttcgagcgcaatgtttctgtcatgggagattatagaaagaagttttatcagatgaatattgctgtgagcaatgtttatcagaagatgggcttctttcctggtgctcatggcattcctgatatttcccgtttggaggatgataggaacagccgtaatattgacttgccttatagcaaagtgaaccatcttaaagtaaccacgcatcaacagtatctttggaatggggtacaactttcaggtgatttcggctatcagttcaatcatcgggaggaatggagtgctttccatacccactatgacactcaggtgatgcctgcaaaggatccggatagggaactggtgttcaaactgcatacattcagctcctctctgaagctgcggttgttcaattcctcttcctgggagcatatggcagggtggaatatgcagatacagaaaaatgcgattggcggatattcttttctgctaccggaatacaagcgttttattaccggagctttttggctgacgactttccgactggataatcagttgtctgtaactggtgggatacgttatgatcggggaaggattgatataacagcattcgaagatccttatttggtggagtatctacacagacaaggatatgaagaagaggtaatacaggcatatcgttggcgaagttatccggtggacagggcttatggtaattactcctgttcggcgggagtagtgtggacacccgctgccggtcatcttctgaagatgaatgtgggacgtagcttccgtttgccggggggcaatgaattagcatccaacggagtacatcacggaactttccgtcatgaaaaaggagatgccactctttcttcggaacaaggatggcagattgatgcttcctataccttggcttataaaaaaatggaactggttgtttcatcttttgccggttggtttgataattatatttatttgcgtcctacgggagaatggtctgtattgccccatgccggacagatttatcaatatagtggcgcacgtgctttgttcatgggtggtgagataaatttcaatatggattttctacgtcattttaattatcgtttggttggtgagtatgtctatacttataatcgtgacgaacatacggctttaagtttttcacctcctgtatccatgcggaacattctaacatggaataaaaaggattttcagttgtatgctgaatttcaaagtatagcttcacagaaccgtatagcgagaaatgaagaccgcacatccggagcttgtttgattcatctgggtgggagtattcatatacctatggccaaggcggatattgaaatatctttgggtattcgtaatttgtcggatgtgaaatattacaatcatttgagtttttataggaaagtggaaatccctgaaccgggaagaaactttcagatttcgattaaagtaccatttaaacaattattaaaatgaaaacaaaattttattttcttgtaatcagcctattggctatatgctctgtttgtctgcctgcgtgtgataatgatgaaaaaggggatgtaacaaagcccgtgatcgatttgatagaacccgaagagggagcggtgttgaaaattggtaatgagaaaggggtacattttgaaatgaatttgtcagatgatgtgatgttgaaatcgtataaaatcaatattcataataattttgaccaccacggacatgattcccgggcagccggacagaaaaacatagcttttacttttgacaaggtatatgatgtttccggtttgaagaatacaaaagtacatcatcatgatattgttattccggctgatgctgctcccggagattatcatctgatggtatggtgtaccgatgcggcgggcaatcagacagaaatggctcgtaatattgtcttgagtgcggacggaggtactgaaacggaacatgatcatgaccatgagtgatcttttgtatcaatcgtattgtgtgtattaattgtctgatggcggtcgatgtgaatcggccgtcactttattttgttggatgtcgccaaagaataattttcttccaggaggtaataatccgtttgtaaatagaatatttgttctgtaaatagtgatgattgtagctctattttctttatttttagtatatcttgtttgatataactacctttaatacctttgcaacaggtaaaaacagaaatatataactctaaaaagataaagattatggctacaaaaaaattacatttcgaaacattacaacttcacgtaggacaggaacaaccagactcggctacggatgctcgtgcagttcctatttatcagactacatcttatgtatttcataactcggcacatgcagccgcacgttttggtttacaagatccgggtaatatttatgggcgtctgactaattccactcaagctgtttttgaacagcgtgtggctgcattggaaggaggagtggcaggacttgccgtagcttccggggctgctgccattacttatgcgtttcagaacattactcgtgcaggtgatcatgttgtagctgcaaagactatttacggaggtacttataacctgctggctcatacgttgccgacttatggtgtgactgctacatttgtggaccctagtgatctttctaattttgagaaagctattcaagagaatacaaaggcggtgtttatcgagactttagggaatcctaattcgaatattatagatatagaggctgtggcggaaatagcacatcgccatcacatacctttgattattgataacacttttggtactccttatctaattcgtcccattgagcatggagcggatattgtggtacattccgctacaaaatttattggtggtcatggaacttcactgggtggcgtgattgttgattcaggtaaatttgactgggtggcatcaggtaaatttcctcaactgacagaaccagatccttgctatcatggggtgcgttttgtagaggcggcaggtccggccgcttatgctgtccgtattcgtgctattttattgcgtgatactggcgcgactatcagtccgtttaatgcttttattctgttgcagggattggagacactttcattgcgtgtggaacgtcatgtagagaatgcgttgaaagtggtggagcatttgaaaaatcatccgaagatcaagaaagtaaatcatccttccttgccggaacatcctgaccatgctctgtatcagcgttatttccccaatggagccagttctattttcactatcgaggtgaaaggtggtcaggaagaagcacatcgttttatcgatagtctggaaattttttctttgttggccaatgtcgctgatgtgaagtcattggttatccatcctgccagtaccactcactctcagttgaatgcggaagaattggcggaacagggtatttatccggggacagtgcgtttatcaataggtacggaacatatagatgatttgctggccgatttggatcaggcattagctggaatttaataagatatactaatagaataaggaatattactacaatataaaatcaatatatggataagaagtgtatgccggaggtttgtgtaaagatacattatacatgcttctggcattactttatttttactaataaaaaaggatagatcattaatccaaataggattcttttttgttattaaaaaaagaatctttgcggaagtggggtttcaaaggcttaatttaagagtttatggataccgtttctttaacttaaatacaatggttatgaatctagtccttgctattattccggtattgctattaattatcctgatggcgttttttaaaatgtccggtgacaaaagtagtgtgatttcccttgtcgttactatgctgattgcttttttcggctttcattttccggtagacgatttgctgttttcttttctgtacggtgcattgaaagctgtttctcctattctgattattattttgatggcgatattcagctataatgttttattgaagactgaaaaaatggagattatcaagcaacagttttcttctatttctaccgataaaagtattcaggtattgctgttgacatggggatttggtggcttgcttgaagctatggcaggatttggtacggcagtggctataccggcggcgattcttatcagcctcggattcaaaccggtattttcggcaacagtcagtttgattgccaatagtgtggctactgcttttggggctattggtacaccggtcttggtattggcgaaagaaacgaatctggatgtattggtgctaagcgccaatgtcgtgttgcagctttcggtactgatgtttctcattcctttcgtattgctgttcctgaccaattcgaaattaaaatccttacctaaaaatattttcctgtctttgttggtcggtggtgtctcattaggcagccagtatattgccgcccgctatatgggggcggagtctccggctattattggaagtattttatctatcattgttattgtggcctatggcaaactgactgcttctaaagaggaaaaagcaaggaaaagcacattgaaagggctcgaggtactgaacgcgtggagtatctatcttcttatcttgttcttgattattctgactagtccgttgtttcccggtttgcgtacaacacttgaaaataattgggtgacccgtatcagtcttccgattaatgattcaactatgaattatacggtttcttggctgacccatgcgggagttttactttttgtgggcacgtttgtcggtgggctgatacaaggagccaagatatgggagctgtttgctgtactctggaatacggtaaagcagttaaagaaaacttttatcacggtaatttgtctggtgagtttgtccactatcatggatacggcaggtatgatttcagttatagccactgctttggcggttgctacaggaagcctttatccgttgtttgcccctgttattggttgcctgggtacctttattacgggcagtgatacttcttcaaatattttgttcggcaaattacaggctaatgtggccgggcatattcaagtaagtcccgactggttgtcggcagccaatacggtgggggcgacaggtggaaaaataatttctccgcaaagcatcgctattgccacttctgccggaaaccaacagggaaaagaaggggaaatcctaaaatccgccattccatatgcactggcgtatgtggtaataaccggagtgattgtttatattttcagctaatcttttccggtacatagggtgcgccggacgatagcttatagtaccaattccttgaacaactgttgtaaggtagcatccaggttcatggaaaatccgggatgaggccgtgaagtctgtatacaggcactacgtacagcggtcagccaacggaaccggtccggaatttccatttgtgctatgcttcctccctctttctttccttggcataccttatcaaatacctgtagtgcattttttaggcattccatatctacttccgtagaaaatactcgcaacttctgttcattcagtacatagattgcattcaggtatctggcttgtttggagaacaagactattcctatattaagaaactcctcacgctctactttggggacaaagcggattactgcatattcatataagtgcttttctggcattttgtgcttcttttacaaatagttcggaatggtgaaccctttcttttaaaaaatgaaaatatacctctctcagatcttgtattgtttctccttcttctgcccaagtaagccagtcatcgggtatggcatctgttatttcctgtagtttttcttcggtcagtatttgtttgaaccggttatccgcttcttccaactggctggcataaggcagaagtacatggtcttttattcttagaaaaggattgacagcctgtttctgccagttttcccatgaatgatgaaagtaaagtgctgcgccgtgatctatcagccacagttctttatgccacatcagcatattggtattcttgatggtgcggtctacgttggtgagcagagcgtccagccatactacttgtgaagcggtttgtacgtctacctgatgtacgatggggtcaaaagtcagtgcgcccgacaagaaatgaagtcctagatttagcccacggctccattgcaacaagtcttgtatctcttcatctgcttctgtccggccaaatgcttcgtccagttgcagaaagacgatttcgggtacgcggaaatgaagggcacgggctatttctccacctatcagttcagcgataagcgccttggttccgtggcctgctcccctaaatttgacgacatatttaaaatcatcatccgcttcggccaatgcgggcaaggaacctccctcacgcaggggcataatgtagcgagtgacattaactgtacgtaaatccatttaaacctccttgattatagggaataaagatacgatgtttttgggtattaggaataaaaatagtccgtaaattgggaattatagcactaatttagcatttaagacacttccaaatctgctgaaatatgctgcaaccagggataaactgttgaaaaatcgtaaaaaaagagatagataggagatttattgccaaaaaagaatttaatttgaacagttttataatttataaaaaaaaagaacatgaacgaattaattgctaaaatcaaagaattgaacgaagcttttatgtctgatgctgcattgcagattgaaaaaggtaacaaagctgcaggaacacgtgcgcgtaaagcatcattggaattggaaaaactgatgaaagaatttagaaaagcatctttggaagcttctaagtaatcttttattcgtcttttaaagatttttataagccatccttcggggtggctttcttattttctactaagttttgcttttatttcgggggataattgatatttttgtatttttattggtgggtggttaacctaaaggagaagggatgtttatgaagaatatgtgtctattgcctgtatgggcggttttattgattatagcagggactttcttttcttgtgaaaagaagaaggatatggctatataccgtcaggcggattctttgaacttgctttcttatcatatgcgctataagaatttggacacagcgtgtaaagcagcgcatgacgcctacaaactggcggatggattcccctccctgcgtgccggggcattgaataatcagggtttctgcgcctttatccacatggactttgaaaaagccgaagatctttttcttcgcgtatatgaggagtcaaacaatgaattggaatgtctgatagcagatatcggtatgatgaaaatttgtcagcgtaccgccatgaacaaggagttctatgattatcgtaacagtgcgttacggcgtatgaaacgtatcagcgatgatcgttctgctataactgatcccggagagctggaacggcttaattatgcccgttctgagttttccattgcttctgccatttattactattatttgcagcaggaacagcagtccttggaggcgattaatgaaataaaagtagacgaggcgctggaaagtgatactgcccaattgctctattattattatatgaaagggtctggcggtatgtatgaagcggatacaccgcaggatgtggtattgggtgagtttaactatctgatagaatgtctgggtatcagcagggaacacgggtatatctatttcgaggcgaatgcatctcaggcaatggcggaattgctgaaagagaggaaaaacttcgatttgattatggaaaggcgtcccaatgtgatgcgtgccatcaatagtgaggatttgccgtgggaggaactgatcatgcgttttgcctggcaggctttggatttgttcaaacaatatggagatttgtatcagatttcgggtacataccgcactctggcatcgtgcagcaacgagcaaggcaggtatgaagacgcgctgcattatttgtcggaagcactggggtacgtcaaccggcatcacgagaaatattaccattgtacggatactacggatagacttcgtccgtatgttcccatggctaccacttccattgaactggaatggattaatgatgacggtataaaaagtgtccccgaatggattgcccgtttccgtgaacaattgagtgtaacatatgcggcgttaggaatgaaaccccagtcggattacaatcgtaatatttatctggatattctggactacactcgccaggacaaagaattggagagccgttataatgcgttggagaaagaatcggaagccttgaacggacttctggtggtagtggtgattggtatcgctgttcttatcattctattttggatattgaataaaagatggcgtgtgcggaatgctctttacattgataagttgaaacgtactttggaaatatgccgtaagataacagcttccgtgccgattgatgcagaggagatagaggatgtgacaaaagcggtagtaacctcagtgaaagaagatattctttcattggtgggagcgacggacttccgtattgtgactgagaatggagaagagaaagggacaccgggtgaagggatttgtacaagttttatcttgaatattccgggcagggaacaacctttgggtaaggtgcatctatattcggagcataaaatgaagaaagatgataaagcactgatgcaggtcattgcgccctatatttcgtggacactggagaacggactggctttcatttcgctgggtgatgaacggaaacggttggaaaaggagcactatgtccatgagcagcatttggcggagaataaacgacagaatctggtgaaaaaagcctgtctgttcattgtcacgggcattatgccttatatagaccgcatcatgaatgaagtgcataaactaaccgcacacaactatattcagaacgaagaaataaaaaaaagcaaataccgttatatcgacgaactgattacccgtatcaatgagtataatgatattctggccttgtggattaaaatgaggcagggaacactgagcttgaatatagagaattttgatttaaattcccttttcgatgtactggtaaaagggcgtaagactttcgagatgaaacaacaaaccctgaccatagagccgactaccgccattgtaaaagcggataaggcactgacgcttttcatgataaatacattaacggaaaatgcccgtaaatatacgcaaccgggaggacatatttccgtttatgcgcaggaaacagaaacttacgtggaaatttcggtgaaagatgacggtccgggcctttcgcaggaagatgtggagcgtattctgagtgagaaagtctatgattcgggtaaaataggattgcagaccagtgaagatatcagcgaattgcagaagaataaaggccatggtttcggtttgatgaattgcaaaggtattattgataaatataagaagaccaatgaaatcttccgtgtctgcctgttccgaatagaaagtgaattgggaaaaggcagccgtttctatttccgtctgcctaagggagtacgtaaagtgttgatgttggtactaattgcctttcttcctgtcttgactggatgtgatgagaggagggagaaagacgggaaagcggaacaactcactcttaatgattccattcagcgatatgataaattattggctgttgcgaatgaatatgcatacgatgtttacaattgtaacattgatggactataccaacaggcattgtgttatgcggatagtgctctacattgtttgaataagcattatattatgtattcgggcagcaaagggcctttgttggaattggaaggagagggggctgcagcggatttagattggttcaaccggcattttgataccgattactatgccttgctggatgttcgcaacgaggcagcagtcgcttttttggctttaggtaatctggaggcttatcgttataacaataatgcttatacggcgctgtacaaacaaatcagtgaggacacctcattggagcaatattgccgtcagatgcagctttctgccaataataagacggtggctatcattctttgtgtggttattctgttggtattgctggtgggttattatattctgtatttccgccaccgtttgatttatcgttataacttggaacaggtgttggaaatcaacaagcaggtgttttcggcctctttgcttgacggaagaaccgaccgggatattgctgcaagtctggtcaatgatatgtttgagacggtgaatgagttgctgcccattgatgtgttgggcgtagcggtttatagtgaagacaaccatagcttgaattatgctttttcaccggtggaggatgagaacgaagaaatgcgtgagatgatggcccgtagctttgacgcgaagacatcttattggcgtgagaaagataggttaaagtgtttgcccttgtgggtggaagcaggtaacgagaatcgttgcacgggtgtgctggcattgaaaatcgctttgcctgtggagcgtgaggacgaccgcttgatgttggagcttgtggccggatatgtagccatcattgtatataatgcagtggtactgatggcacagaaatatcgggatatagaaagtgcgcaggatgatgcgcgccgagctatacgggaggaaaaccagttgcatgtgcaaaatttggtattggacaattgcttgtcaaccattaagcatgagacaatctattatcctaaccggataaaacagattatcgacaggttgaacacccgtcaggcaggagaaaacgaagctgtgcaagtagagacgattggtgagttgatcagttattataaggatatatttactttgctgagttcatgcgccgcacgtcagttggaagaaattactttccgcagaggtgttgtgaaagccggcgagctggccgattatgcggcacggtatataaaacgtgctggaaaacgtatgccgcatcgggtagaactgaggacggaggtggaacatgtttccgtactgggagatgtcattcagctgaagtttatgttggagaatctgatagatgaagcgctatcatacgaggtggatggccttttggaattgtgtatttataaggataaggattttgtgcggtttgatttccgcgatacgcgtcgcgaaaagtcgcaggaagagttgaacttgttgttctacccacatctgtctcgtatgaagcaggggcaggaaggagttctgaccggtacggaataccttatttgtaagcaggtgattcgtgaccatgatgaatttgccggaagacgcggttgccgtatcaatgcgcagcctgccgctgagggagggttcaccgtatggttcaccctgcctgcccgttgaatgtagaatgtaaaaaaacaatgcatattatggagaataatagatttaaagtcatcattgtagaggatgtcaaactggaattaaaaggaacggaagagatattcagacacgaaattccaaatgcggaagtcatcggaacggccatgactgagaatgagttttgggaattgctgaaagtgcagttgcccgatatggttttattggacttgggcttggggggatcgactaccatcggtgtggaaatctgttcttctttacggaagaactatccggatatgaaggtgctgattttcactggtgaggtgttgaacgaaaagttatgggtggatgcgctgaatgcgggtgcggatggtataatcctgaagacgggagagttgctgactgccacagatgtacaggcggtgatggatggtaagagactggttttcaattatcccattctggagaaaatagtggcacgtttcaagcagtcggtggctcaggagcagcgtaggcaggaagctgtcatcgattatgatattgatgaatatgatgagcgtttgcttcgccatctggccttggggtataccaaagaaatgattactaatctgaaagggatgcctttcggggtcaagtccatagagaaacgtcagaatgaattaataaaccgtttgttcacattggatgaaagaaatggtgtcaatgcctgtcgcttggtgacccgtgctttcgagttgcggattcttgatattgataatttggaaccggatgaagagtaaatattatttccctcataccgctactgtattttttctgctgacagtagctgtagccttgttctcatggataggaagtatttatgggctggggaaggtgcaaagcctgctcagccccgaaggaatccggtgggaattgaggcatgctatggggaattttgtccagacaccggcattgggcatagtaatgatgctttttttagggttcggcattacggttcattccggggtatggggcacgttggggagaatagtgaaaagaggaaagcccatttcccgtaaggaaaagcgtgcgttgatattggcaggttgtatgctgcttgtttatatcataatgattattggcaccacttttgccccatggactatgttgcgtagcgtgacgggatctctcacgaattctccgtttcaaaaagggatttattatctcatttcgtttggtgtgggattatcgggtatggctttcggctatgcatcgggacgttttcgggatgataaggatataataagagggatgtcctgtctcttttctcgttttgccgattactttgtggtgcttttttttatagttcagttcttttcctcattgatgtatacgaatttggtggaatgggttggaatagattcatatatagtgtcttacgtttttcatatttgttgctatttacctttcgcttggatgttgaatagaaaaaaataggttgttaatgcaaaaaaagttacggattcttttggtaatttcaataaaaaccgtacctttgcactcgcaattaaggatggttccgtagctcagctggatagagcaacgcccttctaaggcgtgggtcttgcgttcgaatcgcaacggaatcactattaacatccggtaacagttaaatgttatcggatttttcttttaaatagctgatattaaacgttttactttcgccccgtttaacttttaataacctgcctgtgtaggcatatttgtaggcatatcccctctacaggcataaaataggcatataaaaatgacggcaataagagttgtaagacaaggcaaaaaaggcaaaaccgaccggctccccctgtatgtggaattttatatcaaccgtgagaaaataaggatcgcggtaaggttaagtgtcacgtccaaagaatgggacgagcaaaacgaagtgataaaaggccgggacaaagagagtaaagacaaaaatttaatcatctcaaacatccggtcacgtgtaagcgacatatttgttcgtgcccgtcttaaaaatgagacgctgacaaaagaaagtttcttccgccagtataacaatccttccgattttggtaccttctttgattttgcacgggtttacctcaaacaaattagcaaaacaatttctttcggtacctggaaacatcacgtttctatcatcaagaaactggaaacattcgcccccggccttgtattttcagagattacccatgaatttctcctgtctttctttgcatatcttcgcaaaataggtaacatggattctacggcatggcgtaacatggctactatcaaaatatatgtaggtgccgccatacgcggcggttatatggaccaggacccgttcgcggccataaagatacgtcgccccaaaagtgaagttatatacctgacggaagaagaactcctccgtctgaccgccttgtaccggtccggccgcctggaagaatgtacccagaacgtactccgtttttttctgtttctttgttttacttctttgcatataggcgatgcaaaagcattgcagataaaccagttcatagggaatgaactacactacacacgaggtaagaccaaaataccggtaactgtacccttatcggacccggcacgttatatttatgaatattaccgggccggacgtacaaaaggtaacttgtttatgaaccttcccacggatcaggatataaaccgggtattgaaaacaatagccggtaaagtaggaataacaaaggatatcagttcaaagaccgggcggcatacattcgctaccttgtattataagaaaacacatgatatcgtaacgctatcccaccttttgggacatagttctataactatgacaatggtttacgcacatgctctggaagatgaacgcgaagcgggaatacacgcctttgatgatatgttataactaaaagagtgaagggggaaccgtatttcccgcttccccctttcgcttttctactccaacgtataaacactccagtctatcgcctttttaagttcccagccttccttttgtgtctcctgtatatgtttcacggcaccggtgtaaaactcttgtagttgctgcatacttgcaaactcgtaaaacgtcgggttgtcttcttccccgagcttgaaagtaacaggaaggttttccccgcctgtctgcaaggcaagatcgtacgccgtcttataattcatctggttctccatggaaagccagactttcagaccgttccatatgtatccgctttcgatcgtgtcggttatcttccggttataccattcattaataaccgccttgatttctgccagtgcgggtagatgatcgaacgtctcttccatgtaactacgttggactccttctgctgtctctgtttcctggtaatcccacgtaatgcgccagattccccggcggcggttggtacatcttaccggttccgccttgctgtctgcataaattcgtatcatttcaagtaaaatgtataattatcaatcctttttcacttacttcaccttcgcaatgtgcttcaaaaggcagttctccgtctcttgccgctgattcacaaatgaaaagggtttcctcaaggctggtaaaatactttctctccttgccgtcgagttccagctttataacagtccggtttccgtttttcgtcggaacatccttttcataatcaagtacgatcacatccttgttcatcagttcgggcgacttgatccttgccccggtaaatcgtttccgtccgtctttaggcttgtacttgtagcccaaatcttttaattttttcattttctttcctgttagtttataaaataagttcttgcaatcagcatgttttgtaagcccgtaaaatgaagcggttaactcctgcctacgtttcttgcttttaaccttgtgcatcttgcgggcgaacttttgtttgttacgcttccttaaccgcacatgatccgggcgggttacatatcccagaaagtcgataccttcggtaatcgggaaaacggtatcattacttttaatctccaggcgggctttacgggcctgttcatgaatgatatccctaaccttccaaaggtatttcttgctaccagaaagcaccagaccgtcgtcacaataccggtaatagtgtgctactgcctcctgatcctttaaccggtgatccagataaatagacagaagcaaattacaaagcccctgcgatgatcttagtccgatactcacgcctttaggcatcatgcggatgcactcttccaggattccgatcaatattttatccttgaacatctttttcactgcatccagcaaaacgtcctggtctacgctctcatagaatttcgttatatcgaactggtacccgaacagggttccttcgggatcatcctttatatctttaacgatatactgtaaaaggtcatgcgttcccctgtttttaatggatgcggaggtagtccggataaaacgtactttcaaatgccggtccaccacattcataacggcgttaagaacgatcctgtcttccagggaaaccgattgtacgatccttactttcggcccgtcgtctacggtcatttcccgatatcctccgagcttgaaccgcccactcctgatccgctgcctgatcctctctaccgccttcgggacatccgccagtattctacgcccggcaaagctgcgctttcgtcttcttttgcgcaataccgtttttatggcgtcctctatattggcgtcctcgacaatctcttctataatattatcttctctccacatgataattaaatcagccttcaattccccgggccgggcttcttcgaaaaaacttcctaccaaaccccattgccctgcgctttatttttcccctttccaaccgtaaacggctgctgttggcgaggctcattcctcttggctccacgccgggaacacgttcccactgttgtacgccaattttcaaggcttatgcgctttttctttattctaattgtttgcaagccgaacaccgatgttcgcattcgtgttcgatgaatcgttattcgcgttcgcatacgaaacaccgcctaacgcgttcgcgttgttgttcgaccgatacaccacacgagtgtatatgaggaaatccgcctttgtacttttcggaagtaccggcgcccgtcttactttccggacgcccgcgctacccgcacaacgttttacgttgctgttttttctcttaatctgcctgatttatggctttaaaggccgcgacgctgcccgcccagcgtattatgcccctgaaggcaagccgaacaccgatgaacgcatacgtgctcgatgaatcgctagacgcgtacgcatacgaaacaccgcccaacgcgctcgcgtcgtagtacgaccgacacaccacacgagaaagaccggtacccacatagaacctatcgaaccaatgtgaggaagtggaaccgccttctttagctgcaatcaaatccatatactggccccaaaccatgtgggtaggataaatatccgcgttataaacagtaattccctgtacaatgcgttccgttccgtccggcatggtaataaaccaccttccgtccgccgccgtcttgtttactgtgacatactgcaaccattccgccttgtttccctggaaattctcatatcccagcacattgacggactgataatttacaccgtcccgataagcaccttccgcctgtggattggaaccgcccttttccttataataagaaaccgtatcacgcatccccagcgcattggtaaggcctgtcactttctggtaattgtttgttccatatccgcaaactccctgcgaatcggtattaccgtatttaaagaaatgcagattacccacatccttgtgcatctcccagtcgaacagctggaaacctttgccccgattctgggcgtatttgactgcctggctctgtgaaatggttcctacacttgaaacaccgctgacagaacgcagcacatcatcaatcaggtaggcttcataagcaccgcccaggcattccgtatgctctacccagtccggctcgatcgcttccacactttccgacgttgtgagtaaaacgaaatcgaaggccgccgaattaaggaaagtaaaggccaggaaagtagcccctgcgggaacagcacaaaacaggtacataccattaataaaaccgttcgcgtttgaaacgcttacccgacttactattttgcccgtatcatctataaatgcagccccgtaaagagtggaagccagaccggggaaacggacctgcttgtaatcccgcacgtccaccagggcgaacgatccggattcgtattcattcttcgcctcttcaagggtcgtgtaatccgtattcttacgaatcccgatcccttccgttacctccagctcttcgcgggtaagttttacactggtgtaccctgccgctgccggcgcatcctcattgcttgaaataaaaccgtacagacattggttcagcacgtccgttactcccttgtaccagtaatgaggctcatatacgtaaacttcgccttccgatccggttaatactgcatccgtggcgttctccacgctgtcactgtcggcgtatttgttccggctctcatcatgaagcggataacaggtcatttcaccctccgccgtctttttggccagaacgcaatgtcttttcgccaacacctccaggatatgggaagacggggtaaattccgtattatagtcatatccggtagagttatccaggtttgtaatcttttccccgtcctctaccgtctggtctatttttatgcagacaaactgcggctgaatgatattcagttccgggaagtgcgcacaggtggcggcgtactcttcgtccgacatggactgggtcagccggtacgtacccaccaggcggcacgtctgcacgtttcccccgtcttcatcaacaccgcccattgtcataagcccgcgaagcaaacttccgtccccgtccatatctataccggtaattcgtagatagctggtcgcgctgcattgctgtaacaacgtgttccagtcgatcaggctacagttatcaatcacaaggcgcgtgatatttgccgtgctttccagctgcagccctgcattggtcagtttgttcaggtaccggagctccagcgtctgcaaagttgcgggaaggacgcaaacggccagaggcgcaccgccggcgaatgtcacaccggtaagggatgtatcaccggccaggaaggtttcaagtttggtgttgcttgaaaggtccataccggtaaaggaagaggatttaagcccggatatgtcgagttgtcgaaggttacggcaattacccaccagaagggcattaagtgtcatctgtccggcctcacagctaacattcagttcacgcaaggccgtacagttgttcaggttcaacgtgccgacaatggcgtgggctacatccgtcagatcaagcccgcgaatacggcttgcaccgtagaaatattgcggatcgtttactattaaatccgtgtccattgtcagttccaccacagccccggccgtttctgcaagtaccgcgctttggtgcggtgttccggacgtgtaaccgtacccgtaataataccgttcggaggccgtaatccgaattttccggttatcgctgccgaacttatacccgaaataagctgcgaagctgtcacgacgataagtaccggccacgtattgactatccagaagggcgaaacggttctgaatggtataagtacggtgcgcgtaacggcttccctgcaaggcatacagataattataataactggttccgctgccggttgtcaccccttcggtaagcggaaggatatatttatattccgaatccttgttataaatccgctcgcaccagttgcccatttgttcctcgttaaatacttgcaggacatattcaaggctcatattgctacgcaaggtttccgccacttcacgcaatttgtccggacaagaccgtaccagttcccataaaacggaatcatggccggcaaaagcataactaccgatactatcgtcaaaactttcgtgggtaatggtatattcgtatttcagtaccgaatcattacgcacaccgaacagcgtgtccatatcgtaaggaaggaaataccagatcagagagtcccaagtcgccagcatcatgttttttgcccggttatccacagccataaagtaatcggtaatcagataccatgcaaacgggctgtcattaccgaaatactggttatattccgccaggaacttggcgggatcatccttacatgaatcgatccagttccaaagccttgtaactgccgccttgtcgtcctcgtgtgcatccgcccaggtagtgtccgccttgaaacgaaattccagcgcatcatcaaaagaagacatgtcggtagtcccgaacagacaaagggcctcggagttgttcaggaactccagacagatacatttgttacgctgcccgttcagggccgcttcgtcgttgaatccttcaattccttcaaaaccgtaaatgatcgcactttccgacttctcattattgaaattgtattttcccagataagtattcgcaccggtgccgtcgttgtcataaaacaggtccatagggaaaccgtccacgcctatacgtacgtcatattcccccttatatgcagcctgcggcggtgtcagccacccgcacctcttccaaacgtcgttcacaatacgcaccgcaccggtattatgtgtaccggaagaatcggaaaagtccgctttcaaacagaatatactgatcggccgtgctcccggtttgaaactgtattcaagggacggcacatccacgccgttaacttccagcgtggtaccgtatttttccaggcgcaagaaataaagacggtaattcttacgcggataagtggtggatgatgtaccctgtattcttagaccgacattccttgctacaaaatcgtactccttaccctgcgggctataaaaatagatatcgaccggtacctcgaatttcttgttattggtggcgttgacaaggttcacatcgccgacaattcgcataaccgcctttccctgggcgcgtaacttgtctatgtcgatatccgtaccgttgtcccccgtaacatcattcttttcaaataacaggaccatttcgtccgacgtagtccggtctaccatgtaattgttcaattcttcatcatccgtaagcgcacggttataaatacggaaattcctgatctccacatccgccgtatcactgaacaaacggatgttcaccggttccgcctgcagtaatccttcggtagccccatactgcaccgctccgcaacggattccgtttacataaagttccagcaaccgcttgccggccttggccccgacaataaaggccattttcaggttcatatcacttgcaaacttcgtacttacttccgtaccgccggaaacacgcataagggcctgctccgttgtcatctggaaaccgatatcgccggccatacagtccagtatcaccccctgccggtccgttaccgacgaacaaagaatttccatttcataggtagccccggtagtggttgcatccgtggagaacggccggtacccgatttcaatcttcgcgcctcccgtaagtttcagggcgtcacccgtccagccgttgctgctccagtcgaaaccagaaaatgtcgtatgtatgtcgccataatcccaggctcccggatcggattcgctgttactccgcccggctgccgaaagtttcagtacaagcccggcggtagtttcctgcaagtcgatcccgctttccgttacgtcgatataaaacgggtattccgtggcccccgtcttaaatttcatagtgatctcgccctgctccgtaaaacggttggtatatgtctgcgtagtacgggccacactgacagactgcgttttcaccccgtcccggtaaacgtccatttgagccggcgttgcgtcaggatcataagccacaaagtcaaattttacctgttcgtactgccccgcttccaagcgcggaacaagatggtcctccgtaaaaatacggccgtccggaaaactcatcatcgtgccgatgaacggtgccgatcctccggatttcagaatatcaatatagatactttcagactttaacacgagatcggcggaagcctccatttcggcaaccatttgaacggtattccggccggtcacaagcgaagagggggacaaactgaaactgccgtttgtcgttcccgatcttgtaatggtgtgcgcgttctgttgccggccgttcagataaagcgtgacgacctttgttccggaaccgctcacggcataagggatattaatcgtgtcggccagggtataaccgcctgcggctatggccccggccagattgtaagagctggtaagggaaaggctgacaaccttcacggatgtaaacgcctgtcgggtctgtttcttgccggtagtcggatcggttgtggttgccactacgtaaatatcggtattcccaacaagcaagtaacttgaaaggtccagttcgtaactgcctttggaaacatcgctgaccgtctgggaatacatggtagttgttccacgcctgatcgtaacggtgatatccgccttttgcccggtagattcccccttttcatcccccgtggtgtattggtgatcgtatgtataagtaagacgggcgtttccgccttccttgattatggcgttatctacagccgcattcaagacaattttagtagccaccgtttcgccggaacctccaccggaaccggccgggatatccacggcggtaatttccgtgccgcttttgttctggaaagacagacggacggatgtttcatcctcgcttacctccgcatttacgttaaacagcgtggaagcgtccacctcgttaaaacgggcggttactaccttgttttctaccggattggtggaatcggcggacaaagtctcgtccacttccaggatatccacgtttacattcacattaccggccgcgtccggcgtctgcttctcgccgtttaccgttacgctctttaccgttcctttgccgccgaactcttcccagctcgcctcctggtcccaggcatccagggcggttccggtaaactggtacgtctcccatttgccgagcgatgtttcaaaggtgatgacacgcccccggccgcgccacttctccggtaccgcggcaatggcggaagccagggtatagaaaccttccgtaagcggcacactgccggttacgttataggtattcccgccgcctgaaccgccgctgccgaaatcctcccacttttcgacattctcaaaatccgtgtccggattgcctttaaattgtttcgttacccagccgtcggcagtaaggaaagaaaggatcacgccgtttttccggacatcgtcaatcttccccgccgttttcaatgctgcaaacactcccgacaggtcactgtaaacgctgccggcgttcaaaaggttgtttacattggtaaaggtggaagacagacgcccggccgtctgctgcagctcctgtttcatttcgtcacggtccacctgcaacgtgtttatgtcatcggaacaactgctaatatcctgggacaaacttttcagctttccccaaagggaaccgtcttcactttccgaaccgtcttcgctgccgatacgggcgttgatatcggccagcaatgcggccagcgaatcactgtccttaagcccgtccagaaaagcaagaatttcgttaaagttgtcgattgcctgcgaagcgttgtcaccgacaagccggtcgatacgcaaagaaacggcgtcgatagccttctgcaaggctgcatcggcggcaatgcgggcggcttcctccgcctcgatttccttaccctgggaaaccagtttcaggtgttcgttcaagaagccaagaaccgccgccaccatttggttagtaacgctttccgcgtcctccgcggtttcaatgactataataagatcatcgatatactcctgtgttgccatatagatacattaattaaattgtttgctgaactctttggaatgaacccgcggtttccggtagccgcttttcgtgatttctcccgtccagttggactccttctcggcaaacgtgagctttaacgtcacgttctgcggcgcgtccggacggacacggtaagaaaactcttccgccgaaggaattaccttgatctcttcccggccgtaacctgtcaggtaaacatcatcggaggaaagcaggtcaagaagaaagcgtatttcctgcgggcgtttgaatcccgtcttaatcgttacggcttcctgtatctccgtccgtatgcgatccgaataataatcatcggtaatttcatcgtaacgccggaaaacagcgtcttcgtcttcatccatgccgggagttacgctcgcctcgccttccagggaaaacacctcgtaaaccccgtaactgttcaggaaccggagccggtaacgctcgcggaccgtcgggctttgctcgatcccgatccgcagggcgaacgtttcaccgctatacacgtcaaaaaggttggccagtaccccgtaatcggtaaagaatttaagtcttacggcctccaggttcaaggcgtagaaattccctgccgtacctggcactgcaaggctttgtccggtaagaagttccgttattttcagctcatgctccggatagatgaaacagagcgggtaaagctccgtttcgcgcatcgttatacgccagtcatcactccgggtggtaaagaagaaattacaggattcattcaagaacttcaaatcaaaaatgttacttcccttttcatgcagtttcttgaaagaacgtttggatataccaccgcgccaggcggtaacaaccagataggtcgattcctcctcctcgttttgaatggcgaccgtgacgaccgccttgttataccgtttgtcggaaaggcttatcaacatctcggaactgtccgttaacgggggaatatcgacaaaaagcgtttccaagacctccgcgatgtttaccttgaaacttccgttaccgttgccggtaaatatggaacgcatggcttcaaagttcacgaaatacattatattgtaagtcgccatagaagtagtttctaccgaaagatagacagggtttccggtaaaggcgtttttcgtcggatcgatgcttgctgtcaaactcataattcaaacgtgttaacgatgaatattccgttaaactcactcttattttcaagcccggaaaggaaatggtcacgctgatccgtgggagacgtcaggaacttgtaaaagtccgagagcttccccgaatgattttccctccaaagcttgtaaagctctgctacctgtgtggtacacggagcaagtacgatattattctgcttttccatgctgcaaaagttgggtttatcaaaggaagaataaaggacgggattaaccggaatatacaacggagatgaactcccctatatacgaaagggtaaatgtttcattataagttccggtagttgcttccggatcattctgtatataatttatattcactcttaactggaactggtaatcccgcgtcagcgtatcattttcagaggtgggcggattttctattatataatcatccgtaccgggatttataaaaccgtccgttatggtccaatagcgttcattctcaatagtaaagcctaaacctttcaagtagttcaatacctcctgctttttattttcctgcacttccgcctgagtattacgaaccagtttccagacatataaagtactaccgaaatctttaataaaatgttcctcgtcaagattatagggagctattaaccggagtgttcttaatgtcagatcgacaggtacaatcttatttgccggaagcgaataagaaagtccgtcaaaaagcagatactgtccccgcagggctacaggtgtcaatatatccatgctcataagctggtggaccggtaacagggtatttgcttctacctggttgaaagagtgtcttattatggcatcgtattttttccagaagtttataaacaggccgttcttatattgaaataaaagcgatatcgtatgtttacttccgtctttgaggatgacctcctcaccctcggaagtataaggcaacacagaaccgaaaggatatttactattctgtgaggatgtaaacgcaaacacgaaagataacggtgtttccactttctccgaatcttcatcatcattattggaggatgttttaagatatgtgtaacggtgtacgtaatcggccagatattgaggggaaagaatatcattcggggcaaaatccattggaacgcattcatcatcgctggttaattcgttatcttcaatactgtcgcttttccggtcccaggaaaagaaactcgatgaagaataagtaagacgcttgttgtcttcatcccatttgaaccagcgtcccgtcgtttcctcgtaattaaggtgtatcaccctttgggaaacgtcaactctcgccaggcgggccacttcctgatcctttaagtagtcttcaaaccgttcaacagagggggccgcaccggtaaaggaagttttggccgacaacttcatttgccgggccgtttcataagttattaaaggttcgtctgtcaggctgcgggataaatcaatgtccggaacatcatccacaatatcacggatcagtcttaaagtggccgttttcgtatcggaagaaacattataaaccagtccgaaacgcacataaagggcgtttaaaaagtcctctaccgtacaatccggcattaaatcggcgtaagaaagctttcctttaacacaacagtcggccgcattattcaggattaccaggttataaagttgtttatccgtcttaaaaggattttcggttatggtatatccaaattccgaaaaaacaagttccagtacacgccatacatataaaaaggccgttacgccgtagccttccggaagtgttactgcagtcggagttccatttactaagaaagtttccgttcttgcctgataacgcaacttatagactttacttccctctgatacaggcgtgatataattcaggtatttggggtaagactggttatcttttgaatcgttaccggtcataatctggaagacggcataatcagtctgataaccttctaatacttgttgcaaatgcgcacaaagggaatttacgctgctatattccttcaccggtaatgtaatggcatttaatttctttgctttccaggcgctgtaggcctccgaattgtcaaagccgatgttaagggtaataccttcttttttaccggcggaaacgatatttatctttccggtacgtttatatactccgtccagtaccgtacatgcctgatcttcattcatcggctttacgcccatgtcgagacggtgggcaaaaccggttattttagcattgttaccggtacatggaaccgtgaccggtacggtctgcgatccccggtcgttcatgacgggggatttctcgtcgatctgtacggtaaagtcaccccctaaatccagataacctttgttcgtcttaatctttagcataatgattacttattttccgcgtgtaaaggtgtcgcgggcgttatctatggtttctttggccttctccaaatcctggtaaacgatataggcctttatcaatttgatagcctcacaggaggcgcgaagctcctttgctgcttccaggaactcccggtaggaagaatcacctgcaggggaagtgacgtaaccgccttcataatattcacccggattctgtggtaacgggttggcattggtacgctgccgcctgatcgcttcgatagtactaacggcgtcgatcactttaggattattcatttccggttgtggtaccacatattcccccttatgaactacgccggccacttcataacggccaccgggaccggtgtaaccgccttcataatacccgcttccggaagaaccggaaacaacacgttcagccgtggcggtcttgctgccggtggtattacttacagacatgtttttaatcttgtcccgttcagctttggccgctgcaagctgggcggcaccggtagccgcaagcattgccgcagcaatggctccggcaatcggtccgagatcggcggtcgccttcataatcgaaacggctgtatcggctatgatctgggaacacttgatagcaaagtttacatccgcatacttcttttgaatttccagtttcttattttccttctcttcttccagggcggcggtatcttccccgttgttttcggcttcctgtatgagaacatcgtattttgcttccacctggtcgatttcggcctgctgcatggcttccaccacggaagaagcaagaccggaataaaagtcaaagtattttttagcatgttgtattcccagttccagcctttttttctgatatgtcttttcgtcaatcagcccctggtcgtgcatattttccaacattgccagttcgtggtcgtactcctggctccaggatgtcccgatttccgcctgtatctggtaaagatcattctggtactggaaatccagctgttttatcgcctgttgtttcgccttctccagctccacagtagaaaggccggcggcctttgctatggcaatggcggcgtcgtatttggcttttactgcctttacctccttatcgtaccgttctttcatcccttcggtcccggatttgtcggatgtcagcaactccaccatttgcgcgatagccacccggtcacgcaataacttcatttcagactcacgcacggcgtcggccgcttccgtcgctgtttctatacgtttctgtttgccagtaatttccaaagtggcaatatcattctggtaagtacggtttatctccagaagttctgcggcgtgctccgcttcaacttccagcatataggcgtcggcggcttcctgcgtgatactccggtttaataccgctttttccatggtgtccttctggacgttgtaataggcggtttcgatctttaaccgttcgccccgtttctcctgtaccagttttatacgggcgtcctcctgcttgccggtttccgtaaaaatggccgtctgtgcttccgtttcgagcctgtggatttcatcgagtaatttctttttattagccggtgtttttgcctccagcttttggagggcatcgagacgttcccggtaatagcgaaggttttccgccgtcccttcgagaatatactgggcttccgtcttattttccttctcccggttctctttgattagaagcatacgtttttcgtgctcgatctccagaggttttaatgtggcggccgtttccgtatttttatactccccggcttccactttctttttgactttccccagctcgtttaaatgttttatctgctcatcaatacgttctatctccctgtttttcttggcaagattttctttagtatcctccttccatgtttcctgaacctctttcctttttttctccagcttctttataagggaggtttcttcctctactgcattaccggtcgccttagtgccttccgtcgtgatcttaactgattcccgctgccattcctccagtttcttaatatatggttccagtcttttatttacctttgccaaatcttcctcaacttccgctttgtcaatggtaagccgtgaaaccttcgttatttttgccgtactcaaccggggatttttatttattcttttattcagatcggcgatttcttcctccagctcgtccctttcgaactccagcttagctttttcatcatacaaaggctgcataagagattttagcgagttcatcttcatttcgttttctctcgcctttaaatatcgcttaatggcctccgtgttttcatcatataacccgccttcgtccttgattgaagcgtggtactccggaacgatctcctgcaacttctttatatattcccgtctctcatccacacttaaattcgtgtcatgtatcgcttttgtgagactttttatctggtccttttcctgttgtaaggttgcggaaacttccgattctattttattaaaattagcctgtgcgtcccttgcttctttcagttttttagtaaactggtaaatagccatgccggcagagagtatcaaggcggtaacggctgcataaggattcttcaaaagttcgatcctcattaaccggagggcggcggtacatctggtagtattcttgtgtaatagtgcctgggctgccgcataagtcagagtagccgcccggctgatataaagctgtacggcgtgcgctttctctgcaacgaccgaagcaagggtcgccgttttaaaacgggcgtgccacatggtagtgattttcagtcctccatagtaagaaaccagataagcggtaacggtataagtgacaacaccccatttattaaacatgtcaatcataccccctacaccttccaccataagcgtaacaaggtctattaaatcccggagaataccctttgattcatagaaacgtaaaactaccccttcgatagttgaacttagccggtttaatgcaccttgaacgttatcacccatttcttcggacatggcgttaaatccctcttcggctccggttactgcatcacggagatttaaaacggtatcagtaccatttaaaaaggtattaaatgcggcaaccgaacgtttatccgttaaatccagggccttattaaggtctattccttcactgtttaattttttaagtccttttaccaggtcttccagattatccaccggaccaccgagagcaagtgcgagtttgccgctactgtcagccaggttaagcaaaatattacgtgttgccgtcgctgccgatgaagcgtcaaaaccgctgtttgccaaagcacccaaaagggcggtagtttcttcaatcgtgaacccgaaagaatttgcaaccggcccaacaatagacattgccgtatttaagtactcgaaacttaaagcggatgcgttacatcccatagtcatagtagaaacagcccgttccgtatcttctgcatcaagattgaaaatacgcaatgttgcaccgccaagcgtagcagccgaggcaagatccgcgtccaccgccttagcgaatttcaacacggaaggcgtcatcgctttaatatcctctttgaaaaatcccagcttggcaagctctatctgaagtgccgttacctgtgcggccgtataagaagtagtagcacccagccggcgcgcttcatccgttaaatccttgatactttttttcgtagttcccaggatagcggccaacgtactgtttttcttctcgaactctataatagtactgatcgcatcccttagcccgccgacaatctgcccggttatcattgcgccgatagtgacaaacacaccggccagaaccgtttttatcttgttcaaggaaagaagggaaccgccgaaaccttccgccttcttcgttgcctgtccgtatgctttttcaacttctttcagttccttctccagggcggcatatttttccggctgcaaggatttcaccgtatcgcgaagctctttccgcaaggcgtttgccttccttgccagctggttggcactcatggtggttttatccagccgtttctcacattcggcaatcttcttgttattctcgccgatcgtcttattattttctttcagttgctcatcaagccttttccattgtttaccgccagctttcccggtggcgattaaatcggtcatagccttttttatctccttattgctatcccggagctccttgttcttttctgaaagattatgtatttccttctgcgcatcggaggcgttcagggttaacacccattcgatatagtcaggttttaattttgccataagagtaaattttataaggcaaaattatcctggtgtaaagtggcggaaaaggacacaaaaaaagcccgtagaaccattctacaggcttattatactaagaagaaagtattttatctcttaaaggtaaaatccgaaggatcaaaacattctttatccttaattgttgcccgatctatcatccagcaaatgtaccaggttagaggaaccgatataagaggcgtcacgataaaggaaagaaaggcaaaagcaagccacccggataaagtagccggtttatgcttacatcctacgaaaaaaaatattaccaggaaaaagccgatcaaaaataaaatatcttcgtatgtcatacaatcatcgttagttctttaccgatatctttaatagtatttactattagggcctcccgttcttgtgagggcttttttattccacttatatattgagacataaggctttgacttattcccatacgtcgagccaccgcagaagcatttagttccgggtgagaaataaaaatccgatataagaaagtttcttccttcttatcttgaatagctaaacaatcattcatagggtctaaaaatatgcagctataccaatttcatataaaaactccggtgcaaggtcggcaccattggcccattcaatagtagcacgggttaaaccatattgaacaaatttttccttatccaataactccccgaaaacctcacctgtaagataaggttccaaatttacgatctttttactcccgtcgctgaaagtaacaagaagctcgtaattcctaatataatccacatctataacccgtaacataagcgtttattttaatggttcaattttatttattttttcccctttttgggccttttcccaaagagaaagtatttctgcctcgtgcaagttaatccactcatttacttttgcaataactttagctggagcctgaccgtctacaatccgatccaatacgctaatagaacattcataatcaccataagtaaaatgaatatgtggcggattatgatctttccaatagaggaatataataataccgaagaatctacaaatttcaggcataaactttgttttattggttactgaaacaaagataggtaataaaatcattacctacaaatatttaggtattaattttattacctattttagcgaactggcaaacatttcttttatcctttcccttacataatcctgatattcatatttaatcttcccgagtgtgtcatgatacagaatcccgtatatctgtcggttataaatctggtaattaccgtgtttcttcatatccaggaagcgggtatataatggaaggttagaatgtgcaattaccccctcgccgtccggaacgaccgaataattcgggttctgtagtgcggccattaatgcaccggatcgcccttggatgatctccccggttccctgtactttcttacgttcacggcctttctggtaaatccgtttggtagcgatatccaattgggcttgaaatatgtcctgtattccacgcccgatccggtcggtaaagaaatccgttttaaaattctcggccattcagttattcattttttgagaatccggaaataatgtgcctttccccggattcatccttaacagtttcatttttcttgtttgaggtatatttatatttccaataggtacatagcacatcatttacacctattgtaataatacctattatgacagttaaccagaaccacgcaaaagcatccattagaatcttgttttaaatgagaaagccaggctccaccctgcaaacgtcctgtaaaagccggattccggaagagtggaaaggctggttaaatccagttccttagtgacagggcaaccggtggcggaatcttctatcagcatttgtttgatacgctccataaccggctgcacctcttcgatagtctcataagcccctttacgttggggatcgtacttgctcataaggaaaataacgcataaattattttccctcacattgtcagccgaaaggctggcacccgctcccgacgggatcagaataaagagcaccggacattcttcttttgatagcccctgtatcgtcttactcatttcctcgtcaatggtaacgggtagcaccttctttatttcaggaatacgtttttgcacgccttcccagtattcacggtaaacctttatatctatcatatcgtcaatccctgataacgtttcgcctcccattcacggcgggtaacaagccccggaagaatcttaccgcccccgtatatccactttttaaactctgccggtatggatgaatcatacgcatccgctctgatcttcttataaagcgttgatttcttgaattttccgatacctacattaaagcaaaagcttactaccgcgtcaaactggtactgtcccaaatgaaggggaagcgcgtttacctggttttctaccgccctgatatccgattcaaagaaagcatcggcctgggcctcggtgataacatcacccggttttacgccgatcgtgtgaccgtaaccgatcgtacatactcccgcggcacatacatacgctttcaggcgtaacccctcgaatttcttgatcttgttttttgttcctgttgtcgttctcatttcttgttacgtttttggtgtaaatactcaaacttacatttatacagataaagcaatacatcccaaaagggtgtatcgtccacctccttcttatttccgaacacgccggaagccgccacctcaaagactatcccggtccagccggttttatcgtccgccttccggtcctcggatgccagcttctggaacaatatccgaaagtcgatagcttcaccaccgatataaaccggtccggaaagaaccatttcccaaacggcggaaaagaagtttaccgcatgaatggcaagcaaggaaggaacggccggcgtcttctccgggtccttgtaccggtaaagctttaacgtgatatcctggaagatttcatttatagccggatcgtctttttctgctgccgcctgtttgctttgctgcaacaaatccaggcaatcacaaaagttaccgaaagtaagaccgttcagcatgtcaccgacaccatgccagcccccgaaatcctgcatcaggttacgaccggttttcagaataggcgtaacgatccgctcgccctccttaccggttgtataagagaaaaagccgtccagcttttccagttgaccgtccagctctcggatgatctcacgccggtacatggtgtaatccgctttcatgcccagaaggaaagaaagccattttacgcggaactgtccggggctgatcgtaccgcggttcatcagtaccgacaatataagaaactgccggtactgctcactactgacttcatccaggcaggaagggacctccaccgtcttattattatatgtaaacttctccatgtccggacattaaaaggttattcctttggattgtacggtaacacccggtatatagtaatccaccgtttccgactgtgcgtccagctcacggatgatatcctgcaatacatccaggtaagccgccgcgtcctgctccaggctgttagcaaccgactgccgggcctctttttccgcccgcagtttatcccgtacggttgtgctctgctgcacctgtacgattccactgggcagaacttccaccggtaaacgttcaacggccttttttatggtaagaagtgcaagcgggcggcgtacatattccagcaatttctccgttaaaacggtatcgccttcaatcagtttattataacggttccgggtgataacaggtattatctgcccgtcctgaacttcccggatcataggaataagcaccaggaaaagccggtgacttccgatattgtaatattcatcgaacgtttccttattctgaataagaagccggtttatagcctttttcttaatgccgttcatccagaaatcaaatttttcgcggtccattagctccaccaacgcgtctacggcttcataagccaggttccggatattctcttcatccttgaactcctgtaaggcggtcatgcccgtttcattctctcccaaatgtttaccacgtccggccgttccgtgttgtgcgtccaaagtgggaatgacctttaaccaggtaaacatcgctaccgcctgctgcatcagccgcaaagtttccgccatgccgtccggttccgtaacgtccgcatgatcttcacggtaatacttatctaccgcgtctatgggctccgttccgatgatagcctgtaaatcccgaatacccagcggtaagataggttcccacttggtaaaatcaagatcattatcgatcaatcccaggacacggactatttcaccggccccgtcaccgcctttattaaataacttcgtcatttgctcggtctctttttaatgtatatggtttccaattatcaaaatcctttgtgaaattgtttatttcatcgtagaactccttataaaagcgggccagcccggtatctatcgttatacaggtttgctccgtgcgcggattggtgtttatattggccgagctttctattacaaaatcaaaagcgttaccaaaaccggccattactttagcatggttacggaaaatacagacacgtgatccgaaacgttccgccaccttctttaggtataaataaacatccgcgtaggaaccttgaaagatttcacctacataaaaatccgcgcgccctatgtcttttctctccagccatttctccacctccttgacatcggtaattgccatgcaccaggtagaaatcagaacatattccaacggttgttgcttcacgatcacacgaagataagtaaggctgtcaacgtccccatgactgatacagtgataagacgcccctttctcaaaatgccagggcaaacactcttccaggtgcagctccgattttactcgccggtcaaaatggacgtttttcgtccggcgtgcctttatatgcttgtccgggctatcattggcccggttctcttccggttgccggtcgcttaccggttcttccggcacatcttccggtttcggtgtgaaaaacagactacgcattttctttcatacggttagagggtgaaacgttctgttccgcttccactatggtacgataaagccctactttcgttgcggtacccggaaagttggcattaatatactgctgtaacggtttacaaaggatcatgtccggaatagccgtttcggaagcgttatacactttcaggctgtataatttttccgatccggaagaaagcttgttttctataatcaggtttgaaagtaccggatcaagaccgaagccggaagtggcggcagcgtccgccttattggatatcttaatctgggcgtccacataatcctttatcttcttatccagcggttccaccgtccagccctcaaagttattcgcttccggattccagaatttggtcgtgtgcatgtatttcccggcgttctgccttccggtaatattggaggcgaatttctccatagcttcgtccttgaaatcttccagcatctgggccgtgtatttctcgcccgtacgctcgcaaacctgttttatacgtgcttccgcgcggtcccagtaagactgcggcgattcgatatgcagggaaatggccgaagcgttttcattataggcgatcaggatagcggccagaccgccggcaagctccagccagtcaagcgcacccagaaaacgcggcgtactcatgaagtccttgcaaaaggaatagatattatagtatttcacggaaaccggatatttgaacgggtgggccggatcaaagaccgggtaacggtaagtataagccggatcaggataaggaaagtcgcccacaagtacttcctgcggttcatcctcgccgtcgggaggatataccaggcgggccttctgatagggaatatgttccagccgtaccaaacgcccgggattgcccacacgcggcgcacggttccggacaaactttataaaaaagccctgcatgtgtgttaagtctacgagtgagcggtgaagaaccgttgtgtaatcccacgactccaggtcggcggttatttccggatcgagtttccaacgccggtaaaaacggttattgtcttcgtcgattgcatcctcatacagccgcgggccttctccccactgcaaaccggctattttacccataatgccttcaccggcgtagaatttatccagtaaacgcatgacctcgcccggcatgtcgttattgtcacccatgggaacgataaaggtaccgtttacgctgatcttccgcgaaaagaaagccccccgccggtttaactggatgctggaaggttcccaacctttaccgcggccaccgatagaaaaggagatcaaacccttgtcggtgccggtatctataattccaaagttgccacttcgtcttatttccataatcttaaatcgttattcttttcccgttgaactccattaccagacattcccagcaattcagcggccggcctgttgtggtgtccgtcaggaatagtttatagcttgaattttcgatgctttcatccgtcgcctttttcctcaaacgggcagccgtgagtatcaccatgtcgccgccgtcccgtgtctgccggttccatttccggaacttgatagaaaaggttcccccggaaatggtaatccgcttcatctgttctaccgctacataaaggtttattttttccatagccggcggataaaacttttaatcctgccccagttatcatggaccaggcaaaaggatagaaagaaaaacatgaattttaggaacgtccataagctacacccgtttgtaaccttttctttttcctggctttgttgcttaacgtcggatttacgggtaacgactgtttccgcttgactggtagtttccttatgatcctggaaggaactgctttgattctttccagttcttttttcagtttttcggttgctgaaatcaatttctttaattcttccgaggctgtcgtagttgatacggatatgcgtactatcttcccggtaaacgtcaagtacgtgctcctcatggctcgaatctctccgcgcaagttcaataactccgtcagtagttgtttgtttttcttctccagttgcttctgtaaccgtttttcgtgtaacagagcgaggagaacgacaaccgtaaaaacaagctgcaaaacaaataaaaataagtaggtgtacgattccatgtctcatgtttattaagtcgttaattattattagtatcaaaagtgatagatttacggttcgggcaattcttcacgccgcaaagaaacggcttcatagtgtccattacacgggcgttctgcttgatagccttttccatttcgttacatttctgcaggacttccttgtacttgttatccacttcgtcaaaccgttttttctgttcctggtatgcgttctttagctccttacggtcattcttcatatcttctattagttcctggtaaacctcttgtactgacttcatggcatcagcttccgcttgtttacgggtatatcggagagtgaataaccaggtcaggccacccgtgcaaagagccgtaataatcgctgtaattatcgtttccgtcatattgatagagttgaaaattctacattatggtccggacgatacatacatgcgtcaaataacccgccacaatcccggccaggtccgccagaatatccttccagtcccatttattaccgggtgacattttatccccgtattccttacccaatgaagcacccagggcgaagggaacaccataattacccaacagggcacatatagcgtaattaattccgaaatgcttccatttgtcagttcctattttcataatttgaatcattggttatactgcaaaggtgggaagaacggaaaccgacgaaaaggacataaaaaagagtgccgggaaccaccccggcacaaacaaaccctaacctgggacttaaacccaacggctgccttttcagccggtatgctaaattgttaatattaaggattagacaacttttcgatgtcttttttcatcatacgtaataattgaatcctccttaacacctcatttgttggtgtactttcatctcctttctctattaggaaatcgattaggtcctcaataacttcgatgtaacaagcggaaaccggttccgtcttagtttgccactgtgtcaaaatctcggcactttcatctgttatatgtgcgccgtttacttctatatctttcataataattctttctttaaatgtttttaatcggtgtagtctctaaggtagtgaaatcaattattccggcctgccggtatatcccgagggcgactttcctaaaccgttcgtaattacgtctatcaatgggcgataactgccacctcttcatgtctttcatcaaatccggtatattattagcactattatacatacagttgtttttaccgtactcgtgatgaagtgatacagactgaaaatcaccggaaaaaacaaccaaccgtaaacgttcaagttcgaggaaagcaaactcattgttaaccttctccaccttgtatgctcttagttcaatggaaggcgcaccgtattcacgtctaacgaaaaataggatatcagaattatttgtattcatttggcacctccttttaagtcttctaatttaatatgtgaaatacttgttatactttccagtaccccgtcgcatatacttttaacccttaatccgcgggaaccgtcttttttgggtaaattcaggtgataatacgggcgattcctccagaatgtaatccggaaaatccagccacgaactttaaaagtagcattacttattttataatcaacctgtaccagatcacccggtttaaatttactttcttgtagaaacatcccctgtatttcttcctgttccttctttatttcctcaattcttttatcattgttttgtaattgggtaagtaacacttgctgatattcagtatatatcattcggcacctcctttcttttctatctggggacgctctgaaaacctatatattcttttaacccggtaaataaaaaaataggctacaggcttgtcacagccgttattatgtgttttagtgtcctgatctatgtgaataaatccgatgccggaagatattttcaacggcattgttttagggtatttctcgttcagctcctttacctttgcttccagttcagttttaaaagcatcgaaggaaatttcgtcagggcaaagcgtattaccaaactggtttgcaaactctgccatttcagcacattttcgattctgtggcttatactcgttaagctctataaaataggatgtcattttcggcctcctttctgtaccttctttgcccggtacacacaaacaactgcaccgataacagccggcggaaagataaaggttagacagaaccaggcaatagcagataaataataagcatcggaagccgagtttacggaacaatctttttccaattcctgaaaataacgatgttggatcgtgtttacgtccgtgctaccagtacggaacgaaggcacgtagcttgtgccggattgaaattcttttttcataatgatagtgattttgactattaaaaaagagaaaggcggctaccatttcccctaattcgtcaaaatcactaccgcaaaccgtccgatgaacgggttaaaagtaatagggaaaggcaaccgccttatatatctaaaatagataaataccgagcataaaaaaagcccgttgtttattcgagccaataaccgagactcaccggaccgcaccagcggtagcaattttgacaggggcaaatgtcggtattaaaatctgaacaaaaaaaaaaaaacgttaataaaagtttataagaaaaagaaaatttgtcgactctataattcgttacttcgtaacaaaaacgcccgccagaattggcgagcgttaatctattcttatggttcatatctcttttgagtttcaccctcttcatcactttcctttttcatatttcgcataaataaaggaactttcttttcaacctcttcatttttattctctttatcttccatggccgctttctccatgtcttcaaaatctttttgtgttataattccttctcgtatttcatcatcagaaactatatctttacttaataaccaatgatatacattttgattcgtgctctcatttgtaacaacatacgcctgctcaaatttccaccgaaattttgctaaataattcatggcgtctaccatagaattaaattcaattttcttcccggattcatctaccataaacgttttgtattttccgaaataagatgttttttgcccgaagtctatttgtattttgactttagaacttaagactttccctgtaccaacaatttcacaaaacgtttttcgagtttcttgtgctgtagctgctactactaaaatagccaacacggtaattaataataatttcttcatatcagtaacttaaaattagtgtatactttcgtctgtaccacccgtaagttctgacggttatatgcagtgtaattttgacggctgcaaaaatacttaatatgtacaattataaagaatattatccccaaaaatgaaaggcaaccgcccaaaaatacacggtaattcatgaaaaacgccccaaaaaatgaagcaaaaacgcataaaaaacacgctttttcgcgtaaaattttggtctaaatgcagataaacgactgaaaaacaatcaaaaaccggagaaaatttcaaaaactaaaaaaatagcaccttccgaagaccgagccgctcagaagtcggaaagcagttgccctccccctaaaaggtgaaatatgacctctcccggaggggtacccgtaacctggtaacacaaaaaacgccggaaaaccgattttccagcgttacaaggcaattaccttttatgcctgttctctatccattgatccacaaacgagtcggcctgcagcgtccgcttgcctcgtactaaagctatccagccggggcgcatcagtaagtatttgaaagcgtcggagaaattggtggataacatcggtagttttttcggtgccagcttttcggacttcttcactttgaacactaccttagagttaccccggtatttgatttcagcctttgccttttctacggaactaaccatttctttacagttcatcgcatcaaccagcaagataggcaggttcttgttggtaccgcccataatctcctgcataaagtcgtattccgtatcctgccggataactgcctgtttgcggctctttaggtttacgatccagccggtacggtttccgctaccgtctttttctatggcgtctttgatcttacccgcgtaatcctccttctgtttctcaaagttattacctgcacggtcatagtacaaatccagttctttatattcgtggttctggaagaaagtgaggaactggtcggcgatctcccggaaccagcccggcggtatctcaaaaaagttcttatgtacccggtaataagcaccgtccggctgaccgatcaccaaagaaagcatattaccgaagtccataccaccttcaatcgctttatcatggtgcaggtaccggagctcccgcgagctgtaagcggcttctccggacatggtaccgttataatacttatgtccttcaccaaacaacacatagaaacgtaaatccctgcgaagaccgggacgcatacccaccaccgactttttaaattcgtgaagctccagcgtaccattatacaaccgctttaaataatcaatcgtaagtatctcaacattagcgaatgaagaagcgttaagaaagaacgtttgtccttttctcaacttcaacaaagcccggtcgtaatattcaatatcccgtttcaaacgtttcagtttcaaaggggaaggcttattttttctttcttcttttaatagagaaattaccaggtcattacgcatacttgccgcctgtactattttaatgatccgttccgggtccatttgcttgacataccggaaaaaccagtcgtactcgttttcgtcgatatccggcatatcggtagtaatggttatccccaggaataaatgggaatgtccgtaagtgatcgcatcaccgcgaagaataggcatagcgcggtttactttcatttccttgtcgtacttcgcttcatcataaaacagatgtattacagactttccggcaagcagtgaagggttatccagtgatcccatgaaaataacacatccgttccagaagctgtaaacatgcttgtaatcatccacgataaccgaacatttacgccgccaggattcaggcgggcgggtatcttttacatagtgtaccccttcgatcaggcccataagctgccagcccttctgaacggccggcattatattatcttccaggttactgtaggtattggcaacaaaagcgaacgcaccgccgggcatttcttccacacaacgggcggaacgcctggcttgtataacggtcgatttggccgtaccgcgcccgtcaacagatacaaggatagtagtatcgatccagtccgtcagaacctggattatatggccgtatttgatttccacatcatcggcgttactcaccttcgttatcttccccgaactctttgatatcatacaacatacgttttttcaggtcaaaagctttaatacgcgcgtcctcttttatattatcacgtacaataacaggaatttccgggatcgcgtcgataaactcttccagttccttacggtcgatttcaggaacacccagatccttacggctggtagtataaataaccgtgcttttctgtgaaagcagttcctccggtatttcggcctgttgatccttataacatccgcgaagttccgccgccagtttcagcaggttcttagcctccttcacatttcccataagaaagacggtattcgcccagttttcggccttttccgcatacaagttagcgaaagcctgcgggcgtacgttatcctgcgtataaaagaaattgagactgtcagcgtacacctggcgggccatccagtccgaaaggccgtaaggttccgacttcaaaaggcggatgatgccggcctttgtcaccagcttaccatttatacgcatacgggcacgaaggccccgtaccatttccataaggctgtaatattccctttcatcgggcgcgagggcttccagcgtaccggtagaaagaatcctttgaatctggttgatatctaccttgtcaaagtctattcgtgagggcttaattaaattcgtcgtcatccatttgttcgattaaacgttcgaaagtatgtcttttccgtacggcctccagctgttttatagcttccacgtttccgccttccgccgcttcatggagttttatttcaggcgcggcacgtgctaccagaatcccttcccggatcaggaagttaacggaagttcctaccgtttccgcatcccggacaaaaagcccggcatcctccaaagaaatccccagggaaacggctatgtctttcggcgaataccctaaagaagacaaacgccgtacatcctccttttgctgcgcatccaggtaaatactatccaccaccgttaaatcgttcatacgcatcttttattcgtttctgtgccgtgaaataataaatttcgtcctgttccattaatacaaagttccggccgctttcaatggctgccacggccgtagtaccggaaccgccgaaagtgtccaggatcagatcgccgggctttgtactgtcttcaatcagtttacggatcaacgccaccggtttctgtgtgggatgaaccttttcaccttctaccagtttcgcaccggaagcaaaagaccggatattatctattatgtttgtggcaccgatagaaacaccctttccgcaatgaaacaaaataagctcatgtataaaggcgtaatgattacccgggcccgactgtttgttccagacgatcatgtttgacgcacctaaatacaagtcaaacaacggataataaaaagcatacccgcgccagtccgtaaaaaagtacacacaagcaccgggtttcttcacccggttaaactccaggaacaaatcccggtaaaagggtttacagatagacaaatctttaaaactgcctttctgcccgttgtgtgtcattcccaggaaataaggcggatcggttattatacaatctacggaattgtccggaacacgtttcaacgcctccaggcaatcctcgttatatatttggtttgtaatcattggaaagttgtttaagccggctttcttctttttctatccggagggttaatgtcttgagctggtgccccagctccgagcggtcgcaagggtgagagaaacggcccaggttctttgtgatccgttgccgtttccctgtcagactggcaataagttcaattaccctcaaatccgcaactacgcgcctaatatgatacagaagcgaaaagaatctgcatcgttagtaaaaagggggcacagtgcatcgaatgtcaccataaagacatataaatgccccttaccccaccatgcgacttgaggcaatacgcaaaatcacgactataagttgtcggtgttatccaaagtcattctggaacacattggcataagcattgttgcatgaatagatattcagcacatacttccttgatgtcctgacccatttggctggcacagagatgaacttaaagacaaacgtcttgatgcggcttgttgctttgagtccgaacctcttcacgtcaagcctcgccatgatgaatttatagaagttgcgtatgagtgccataagcagaagaaacaccgtgttttctcccataaaggattttggaagcctgttccagccgaatccgttattcatatcatcgaagatgcgttccttccctccacggaggttatagaattcgacaatctctttctcggaagactcgtagtcatttgtaaggatgcagcggtaggtgtattctccttcccacaggtcgagttcgccgtctatccgcttctgtctttgaatcacaagacggtatgccttccctttccatttctcgatgagaatggaggccagctcaaactcaatgccgcccaattccactttcttccaacctctgagggcaaagatgtcattgtagagcgaactgcatcggttagcacggatatagaaggtcttgcagtgtttagcaatctcttccactatctcttcagaacacgagccgcaatcagctctgaaacggttgataataagcttgttttgttcaaacctttcaaagaacctcttcagcgtgtccttctggtggaaacggacatttgtgttgccgtcgctgttctcaatgccgacaatcaagttgccaataaccgccacgccagggcgataaccaaggaacttcttgtatgtaggcttcgcatcaaacttctcagcctctatgaactggtggtcgaagtcaacgtcatacccctcgccctctttcagctgccctgtggacaataggcaattgaggagcagtgtattcagcttgtctgccgtgttgaagtcgtaggtcttgccagtgtcggatgtgtaggaaatgttatcctgggtcagttcctttatggctctaagaatcgtgtcggcactgcatgtgcgaagtgtcggatgaagcgaaaggtggtacatcagatgagtggtgacatcctcgatgcatgagccgccacaaaaataaacgctcataagcgaacggatgatttcgctgtattgataaccatacagcctgcatctcataccgagggttgagtcgattacagatgagagtctggagtcaaattgctccattattgaaaatattcctccaaaaggagtgagtttctcggatttaattgctacctttgccatgtctgtcgggtttgatacatattttgatttgcaacactaagataggtgaaaaatctgacatggcaaattcctgagcaactttttgttgctcaggtacttaaaaagttatatttgtaatagtgttgcggaattaaggattactttttttttcgcgcctcaatttcttcctctatggccttctgtgtagtttcccacttttggatcaatgcaagggcactcgctttcttcttctcatcatccccggcctgttccagtttcgccttattctttgaaaggttggcgcgggcgttattcagtgccttttgtatgtcgatatccgaaaggttctcgacgcccttacggacggacaaactttttaccttctcacatttacccagaatctttccgttctcccggtaatattccagttcatcccacatctcgcggttagcgatgaagttttccacaaccgcctgcgcttcctgtgctgtagaaagtgaactgacatcatccggcgtagcttccaggcgggcgaaagcttccttatacttcccgtatgcggtgaacatgtcggaaacaagtattttcagaatgtcgggacaatccggagaattcaggaaggtaaatttctcgcggaaacgtatcattttggttacggtttccggggctgctttgtatcgtttctccgcctcttccagttcctcttccagctcttccacacggtcggcattttcatccatggaaagaaccttatcccggaaatcggacgaaacgagttcttccacactgacgccgaaagattcggcaagttccagcagcaaatcatcgctgtattttaccggcgttttggatgtttcctcccgggcgggttccatttttaccgcggtcagctgtttggagtttcgccggatcgtcttaaattcacgttcagaaagcccggccaacttccgtagttcctctaaaagaatggccttcatcgtttccgtttctccctgccggcggaatgacttctttaacatacggttgataccgtatttctcgtacagttccacgccctgaataaagttacgcggaccggccagataggtaataatttcctgtttcatactatataaaatttgatgatacaaaggaaaaaaggggcaattaccctaaaaaggacaaagggtggccgggcatgtgctgccggtcaccctttgaattacatgaaagccgtttacttacgcctcataacggctttgttcaatccatttcatagcctccgaaccgtcgttaaacgcccgcaacgtcagttgggaaccttcggaagcggtaaacgtcttaccacctttcagaaggaaattaccgcccgcttccaccgtaggcgcaacacccgaacatcccataagggtaattaccgagccgtgacttccaccggtaacaccggctatcttagccgcacccgcggaaagctggtactgcccgtccgtctggtaatctatatccgtggctccggcttccaccacggccaccggttcttccagagtgtcggtaccccggtaaatggcgatatcatcccctttgctgatctgggtgaaagtaagttcgttcgtattcgattcattggaaccggtataagaaacggataacttacacgggttacagggcgttccgatcagatcggcaggctttccgctacaataacggagcacaacgatacatttcttggacagccagtttgtcttaaactcgcgaatttcctgttcgttaccgggatgattgaacttaacggaaggcgtataaccttcggcgtccgtttccccgtcactgttggaactgatttcagcggtaccgggtgtcaggtaaataccgatcgcgtaacgtcccgccttcattacgatatcatcctcgataaccacgccggcatcgtttctctgcgggaaggaaagaatatcgtcaacgtcgtaaattacgagctgatccttgggctgaataccgttaccgggattgccggccggccttcttacgcttgcttttacgtatgtcataacttaatgatttataaggttataaaatggaagggataaagtatcccttccgccaaaaattagcctcttgccacttcgtagaatttaccgtcggcggctttcgccagcttgataaacttgccttcggaaagcgtcatagcttcggttaagacaaagtttccgccggctgcaatggtggaagcaaattcagaaccgcttccgtagatcgtgtaaacgacaccggcttccgcatcggtaaagttagtgattgccgttgcctttgtattctcaccggttacgaatacttcaccgtcaagcaaagaaggatccgtttcatccggcgcaaactgcaacgcatcggaagaagcgttttcgcggccgatctcgataaatttaccgtcggcacgtttcatcagtttgataacatcccccttacccggctgccaggtagcggaaataaggtcaaattttccgcttttctcaatcttaacgcctttatccacgcttccgcatttcagggaaataaccgtacctatcggcgcgtcttcaatatcggtaatcgtaaattcggctgtgttcgctacggtaacaatggaggtatgaagcttggccgacgggttcttgtccttgtcagcgtccacaaagtaagacgccgggcggtcatactcattacagaagatcatctggcgcgtatagtccatatcttctttcttggtgtacttgaagcccacggcaatagcccagatactttcacgccagttactccatactttcaggctccagtcttcctgctccaggttgaaagccgtcatttcgcctggtttgtcctcgtaggttttaatgttgccttcaaacgtccagaaaatacggtggtggttgtcagcattgggaaccgggataatctttaccgccggatattccttcacatacatgatattagccttgtaatcctggttctgtccgtaatgcagttcattgtatttatgatacaatacaataaagtgcgaaggcatataaagtgccaggttaccgctgtcacgaagaaccgccgggatcatggaagtacccttgtacaccttttcaccgatgtttgcttcggtaagttctcccagctcgaacggtttaatctggtaaacgaactttccgttattgatatcggtatgtccgttcactttcttgttcaggaactcatacaggccgtcagctgcagcaagtgctttgcccggttcgttcagattcgggtccttacggattccgttaatacggcgttgttcacgctcgttatgcaacttcttggcggtttcggccaggatgtactcgataaaagaccacttgatagggtttgaaccttccttgttcaaagtgccgatccaggttttctccagggcctttaaatttttgaaacggtgtgcaaacatcacgttgaacatgcgcagggtttcatcgtcgaactcgtaggaacctttagtcaccttgtcgaagtcggattcctcattgccggcctgtgagaactcgcccagccagatattaaccagcgtagccaaatcctgataaccggattcaagcgggaaaatactttcaatggaaggaagttccattaaaaacgactgcaaacgctgttgccagggaatacgataaaaagccccgaggtcttccttcaaacggctgtagtcaagggaactggctttcggaagagcgatcatttcaaaaccggcagcctccattaacgcagctttggcgcgaaggttatacgggcggtccagtgagaacatttcaccctgcaagcctcccagctgcttttcgtcccggagattgaaagcccctttaccgtccgcctgggcgttgtgctgcttccctttgcccggatcatcttccgcggcggctgaaagttgggcgataataccggaaagcttcgttatctcggcatccttcttggcaatcagcgcggtgttgttccggttttcgtcacgctgttgcgtctgcaaggcttcaagctgttcctgcgcctgtaccagacgggcggcagtatcacccaacaaaccgcgaaggaaagcggtagtggtaggttcttcggttccctctccctggtttccgtcttcggcttcgtcctggaaatcgttttcgagggacgctttaaagtccgtgaggaatttttcaggaaaaccgtagtttttcagttttgccatttcctcggccgtgatagagttcttatcctctaccttgctccattccgacaggcccaacaagcccagcatgtgagcggataagctcttaaaatccaatttcatatatacaaaattttaaagttaatactatatgttatacatctcgtttacttttctgacggtggcctgtgccagtacccactttaccgcgtcttccagcgtaccgaactggtcgatatagccgtttgccacggctacgtcaccggtgaatatctgtccccggaaaaggggaagttccggatcataggcaatacccagattccgactgatcgcatcgcagaaaatacggtgcatgacggccagacgctgctttataggctcttcgttgttctccttttcaatcgcgcgggtttcatagtttttcagatcggcactatccggatagatttcccggtaatcaatgccctgtttcctgaaatattccttaaaggattggtaagtaagcatgataccgacggaaccgacttcacacataggggaagcaataaaggttctaccggcggcggttcccagccagaaatgggcactacccatggtaccggccacataggtggctataggtttggaagattcggcgatcattttagccgccaggtccacatgtgcgaccataccgcccggaccgttgatccacaggaccgcgccgcaaatcttcggattatcgaaaacatcccggagctgcttttccaggcggtaagtctcccaggaatacaaggtgccttccaggataatgacagccacactgtcagagggcagtgtctcatcgtccagctcccaccggttggcaaggtaaggcgtagtagcgtaggcggttattttattattgtcgagccgtttttcgatcgcatccagattgccggctgcaacacacggcacaagtaaggaaagcaaccggtaataatcattatcagcgattgcccaaggtgctgtaaaaatctcctgtattttgtccacgttctcttttttacgacaaagaaaacgcctatatcataggtaaagaaggactgaaaggaacctacaggaacgcatcaacgcccggacccgtaccggacagggtgcagttatacaggcccccgccgatctcaaaagaaaaggtaagcgggtaatcaggagaaccggaaacacgggtattacccgtttcgtcagtatagagggcgacaaagggcgtcgctttcaggttttccaggtaaagcgtcttattttgcgacacgtcggcaagcttgaaggtatgttttttagtatagacgtcttcatttttgctgtcacccggttttaaggttcccggtacgatcataagaatatcaggttttccgatagagcggataacgactttcgagagcacgacgccaaaatggataatgttgtaaacgggaacaagttgcaggctatgggcggcggatattaactttcttgacataattacagatataaagtattgataatcaaacattcagcatttttcggacgtttttcagccaaaaaccggacaaaaaaggacaaacagatacagttggtaggtaaaaaataacttgcttttttacactttttttcggttataggcccttttcttcttacgcctgaaactgtcccgccaccgctggtagtttttcagcagtccgtcttcctgaatggaagagatatcatactttttcaggaaggtaaaaacggtttccttaaactcgattccgtgcaggtgcttgttttcgtccatgagttcgtgcagctcggcccacatcagggcacgcagacgcttttcaagaatggcggtaccgcgtacggaaatgtaattgaactgttccggagacttgccgccggcaaaattggcctcccggcggtcaggcagcataaactccaggttgccacggtcagccggacaatttaccggccgtttctccatgaggtcgtaaacggtcacataaatatcggacgaggaaggaaaacggacggtaccgaccgtttcgtcgtaatatttgccccggacgtattcggccaggtaggattcgatctgtattcgggtggtaatcatagcaataacattcctttttaaaggcaaagatattcctttatcggctgttggtctgccatttacgggaaaatgtaggcattcgaccgccattttgataaatatactccgggagaataattataatacactttttcatgccgccacacgcccggaattttctccgccaggctgtgctgatataatccggtactaaatttttgtaatttcgtaaccgggcaaccggcaaagataaattcctgtatcttagcaacttagtaacgttactaatttccgttacaaaaaaatggccggaaaacagtttgtaaccgggcttaccggtagaagataaaaaggccggtgttacaaaccggaaaaattcgtaaccgttttgtaactgcaacttcgtaacctttatttcctatttatttatttgattttcagacttttttctttcaagcaaacaaaggttacaaggttactaaaattttgtatgaaatagaggtggggtatggggtgggaagccgggcggggcgcatctgtttccatacgaaaagagggaccgacacattcgtatctggtccctcttttcgtattttataccggctccgatccgtcttatacgcgatgtttgcacctgcttaaaatccattcctttacgtccgggggtatatagcggtgcacgacggccgtatagtcctcgttaaattcatactccaggtagttgtcgccttccaggataaaaacacaggccgttttgatgatccattcgagctgctcgcccgaatagcgttccagtgccaggacggtaccgggtttcatacgttccagatagcggtagacctgttcggcgaatttccggaacctctcgccgctgttccagagcgcggtaaactcggacatgctgtttaatttcaaatgcgcgttattcattcatccggtcgttcatcaggtacaaacatgagtgtcggatcggccggttccgttccaccaccggcagccgtttccgccgtgccgcatgaacgcagatagatcatgtcggcggccttgccgtcgttatccttgcgtacgatacgcccctgggagttgcaaaggtccttcgggttgagttcgtcaatgtaggggcaaagggccacaaaacctttgagggcctttgtaaaacgctgcatcgtgattttattcacaccggaaaagcttttgtaatcggcgaaggccttttcacggacgataaaacagtccaggtgctcgctgtccggagagaaataagagttcgcccagtcctcaaagttattgcccatatcggccttgtatttacgcctgataatgttttccatgggcggaagcaattttatagattcctcgcaaagggaaaggtaaaaacggcagcactgcaagaagaaatttatatcggcgttccactcgttctcgctgtaagtcttggaaaacaaatccttaccgaaatcgtcccggatagaacgcgtttcccggtagtcgttatcttccgtacgctggtggtagtagtcggagaataccaggtacagcaaacgggcttccgtagacggatcaaaatcaataggaacgtaattagttgtaaatcccagcttggccgattcctcgaaaggtatagtaaacgactggttgttcttcgggttcacggtcatatctgacgtgatgatgtcgtaaaacaggcccgtattaagataccggtcgcaatcatccaccagaataaagtcagtatgctggtttacctggtcgaacacatgcgggttatccattagcttaggattacggccggaaagcttgacggtcttcataaagtaggaaagggctttgaacatgaatgatttacccgaacgtccgttacattcaccgtcttcaccgatcttgttatccatggcctgtggtgcccaggcacgcgaaggggatttgtaccgatgcagcatataaccgatagtaaatatcttattgataaggtttcttttctgttcggcaacttcttccgccgtgaggccttccccctcgatatcgaatttatgtttttcccggtaggattccgcttcccccacgctcttgtcgtcgaaattgtattccagttccttacgccagtaaacgcggctcgaattgattacatagccgaaaaagttagacggtacggcatttatccggatatcaaacacatcgttgccctctatgtcttttttacgggaaatggtaaacatgtcttccataagacggactttgtgtttcagtacgttttcttcccaaacgtagtgggacaatgtgctgccgttggccggatgttcctttataccggtaccgcttacctccatgctgcaaccgggaaagaagaacatctgcgtattatgggtataattggtaaagtccagttctatttcctgcaaattgtccagggccgtatctgacagtttggggctgttcagaataaggtttcttatatcgcgggataaaaaactatcctgggcccaaccgcggataaacttccggatatcctttgcctttatcagttttacaatattgccggtaatacggatgtatttcgttgaactggaattttcatcatgaagcgaatagaaaccgttaagacgtaaaaagtagtgaaggcagtccgcgtctatattgtgatcccattgccgggatttctcgttaaacttggaataccagaatttggcgggcatggcaagcgtcataaggttacggaaatcctcgttcttgcttcgtaattccataaagtcccggaagtccttacggggtttgccccgctgatcccggtaagtggtaagccaggccggtagccagatcgtgtggatatcgataaaacgtagtgcaagttccgtaccctttaccctgcccgtcgtgtcgatatcgggtatgttatacaggacttcaacgtatttcatgatctccttgtagtcctgttcggaaagtttatatgtttccgaattaaaccagatcggggaaaagcccagcgatttaacgcacagggcgtcgcgctctccggaacatataaacgcctcctgcagcttctgttccttataaggcttttccgcattggccggattctttttaaaggcggcttcttccctggaattaaactcccggtataaggctttcagttcggaaagaccgtttatatagtccttcggcttgacaccttccggggtgtaggaaaaacgccactgcttgtccggattcagaggctcgtatattttatagaacttcacttcgggcgtgtcgccttcggccggttttaccagacattcgcgcataaagatagggtatgtcgcagtcgcgtatttataggttacctcgcgattttttacataccctatatatttggccgaataccagtgcagagcctcggcgttctcctgggtgacacgggggccgagtatgcgtaactgatccggggtgagatgatcggcaagctcgaaaattttagtaccgtctttctgatcctgggaggccggaaccttacggatatccggcttgtttacgttacggttgagttcatcggttacgttgtacatggatgcaagtttaaggatcgcctcgttaaaccggaggccttcctcatacatgcagatatcgacagggctttgagccgttccggtatcgccgaaatccgttaccttataaacctgctgggaaccttcctttccgaatagcttgatacaggccgacgcgtcgtcttctgacggccggcgtttgaaatggcggttggttccgacacaatcccgggcttgcggataataatgtagaataatatccagcccgttgttggttactttgtagatgtcttctgcctttatcatcgttataaagttacatagttacttatttttcgttgttttcctcctgctttgttttcaagtctccccaaggttgatacaggaaaacgaataataacagccaaagaaaagcggttttacccgtataataaatgacaaaggcaatcagtcccataaaggcaaccacgataatagcgtgggcgatgtattttaaatttttatctttcattgttcaaacatgttatactgaattgaaaaaccgaatttgcttaatctcctttcctggagaagggaacgtttgtcatgtgaaggcataatgaccaccaggttctttgtatcgaactggtaacctttcttccgcatctgataacgtaggtttcttaggcgtctgtcttctttcatggcatttcgttaagatcgtcttagtttatagaaggcatggcacactatcacaaaggatagcgtttaaatcctcctgtatggtttcctgttgcttcttgttcaggtgtaccaggaaataaccttttccgtcggaaagattctttatttccgccagattatacttccggtccattgcatccacgaatgcaggggattccatggggcggaagctactgaatattttataggttccactactgccttctattcgtaacgtggttaattcatcgggggtggtaattgttgatttcattgctgtattatttttagaaaagtccacataaagtgtaaaaaactgatttatatttatcgctctttcttcttttgtattagaaagatacacccttttatttttcttatccatttttatttaatctcttgcatcagccatttttcggcctttagccgttgccgaatagatattcggtttatcacctttgaaacatttagtctttatccattcatatctttcagcttcccggagataaaataatattccgtattcagatgtatttttcaaccaatctaatttcttgatttgctcaaatgtcataggaccgccatatacaagcgatgatgttaacatctgaactctttctttcaatgaatattcactcatatttaatttgttttactctaattgattcttacatacttgccacttatgttacaagtttttagtatctctgcgttttcttctccaaaagcgatcaaaacagcaccacaaccaggcgaatccccccgtattccgtccggcctgaaaaaacgaatccttccgcgtagaaatttaattgccgttgccttctcaaatataatatcctggaacatcttactatcacagcggttgaacaacagcgcaatgccattgccgtgttgtgccagtttacgaacaaattgttcaataagcggacgggaataaggtggatttaaccagacacgacctacccaatctttagttaatccgtcatggtttttgttgtacatggtttctgccgtttgccaaagcggtttaaccggagcacatggatctaaatcaaactttcctaatgcgtctataatttctttgggtgtataccactcatcagtggtattagccgatttttcaaaggttgtattcatatctatcatgttatgaggggttatacaattcatatccattatcccaaagactatcactgcgaaaattgaagaaatcttccaaagagatacgtacaccatcttctaaaagaagaaatccgttttcaatagtcatccattcgtcagaggaaaagaaacggtgcgtaaccttcttaccctctttcattgcttgtatagcttcttctttgctcattatcttttcttgatttgaattatttttcaccacttatttttaattttaccaattcaccaataggataggtcgtatgtttcggtctgtttattttcactttatgagaagaaagaaacaacggaacaggttctattcgatagaaagtgtagtaagcttctttaggagctgttttttcatattcctttaaatattcttctgctttatttctcgtatcaaatgcggcaaggatagaaaaccaaacgccgtcttcttcgtatattccggattcccttttagttactatgtaaattttgctcattgttgtttatagctgtgccggaggatagcatcgaactaccaataacacccgctttcgcccttcggggttatctccacactccggcggttattatatggagcggcaaaagccgccccggttatttattcacttttcttttccggaagaaaaacaaagtctgcccaaatatcaaggaattgtcgaccgcaatatgctgccagttccgacgttttgaaggcaagccgaacaccgacgaccgcatacgtgcccgaggaatcgctatacgcgtacgcatacgaaacaccgcccaacgcgtgcgcgctgtaggacgaccgaaacaccacacgagacttttcttcctcgtccaacttattgtattcttcccctgtataaagaataaaccaaggataataacggcattcatcctctgtaaatcgaggttcccagccttcatttaaagctttgacaatgatacggagtttcagaaaagccaaaacgtcaggttcaagaccgagggatattttatctcggttccatgcttctgcatcgatgccaatttcatggcaggcgtcctcaaacgtcttaatacgttttcttacgtctttttctggttcatcaataagggttaagattccatttctccagacagctgttttaccttccggaatttcgatttctaatttctttgatttcattcttcttttatttattggttttcactatggaagatttttacgcctgttacttcctcgatcttatcctttgcaagttcgggaatacgacaacgactacctcgccaattacgaaaggtatgtaatggcactttacatgcttctgccaatttaagggacatttcagaagattcttttaccggcaaattcaaaaggtacattcttagtttctcgccgtcatcattcctttttaatttttttttcgtcatacctttgtgataaatatactcattattgttaactttacatagcaaaggtataattatttttaccacaggtgaataaaattcacgttaataaaagttataacaaaggtgtaatatggctaattttttgttaataagagagttatgtgaattaaagaaaatcactatacgagaacttgcttcacgtataggaaaagaagatagtagcatacaggctattgttagaaatggatcaacgaacacaaaaaccattgaggcaatagcaaaggttttagaggttcctgtaggtgtattctttgatgatattcccataactggaataaaatcaaatgaacttgataaagatgcaaaaatagctgatttagaaaggataattgaggagaaggaacgtctaatacaagtcttattaagtaagaaataacctgtaatagataagaaatgtaggcatattgtaggccatacgtttatacaaatgattaataatcaggcgattaaagaacgttacttgaatcacataaagaaactgtatctctttcgggggtacagcttttttttatggaaatatttaaaaaggattcatctaaaagcggggctatggaaaagatcttgtccatatctctaaacctttcccattggatagttaagggttttcttcctgcttgttctatctccgcaagcctttggagttaactccatagcctttggagataactccaaagcttatggagataactccaagggctatggagatagaatacatccgtataaaaaggtttaacctggaaagagaaaaggcttatgcaacagggacggatgcaatacattgttgtttaattccgatggcgggttattactttttctcagtttcttcgtcctttggacctcacggcagcggaaagattgaaccggttaaaaagtcatgttaaccctttttgcatgcagaagatgtatatactgaatctaaagaaaggtatgaaccggaaaataagaagtagttcccgttaaatttctactatcccttagaaacggaactttcttcttttctgaacaaaaaatcccactcattcgtcatattttcctcttttacatcagaatatatttgtacttttggtccggatgccccaaggaaagaacattttctttgtcaggcttgtctgaaaatcataaataaaacaactaccgactatgacaacacaaaagtacaaaagcctattggtgataatatgggcactatgggcttttcatccttgtttggctattgacgatgtgctccgtacagccaaacgtgatgctattttagcacaaattacaggagccgttcgtccgaaaaagcagatttcacttatttcgtttggtgcgaaaggagatgggaaaaaagattgtaaacctgcatttgataaagcgatgaagcgtgctgcccatatgggaggagcacatattgtggttcccgcaggggaatatcttttgaatggtcctattcattttgtaagtaatgtatgtttggaacttcaggaaggggcgaccttgaaattttcatctgaaccggctttttatctccctctggtgaaaaccagttgggaaggaactttccttcagaattacagtccttttatttatggatatcagttggaaaatgtttccatcatcggcaaaggagtgatagatggaaatgcggggactacttttgccacttggaaaagtaagcagaagatagggcagcagcttagtcgtgaaatgaatcataaagaagtgccggtagccgaacggaacttcggtgaggggtattggttgcgtccgcatctggtgcaattctttgattgtaagaatattacaattgaggatgtgtttattacgaatgcgcctttctggtgtattcatttactgaaatcggagaatattatctgccgtggcatacgttatgatgcaaaattggtcaacaatgatggcatcgaccctgagtacacccgtaatttgctgattgaaaatattgaatttaataatggagatgacaatgtggccattaaatgcggacgggataatgacggatggaaaaccagttgtccttcggaaaatattattattcgtaactgtaagttcaaagggcttcatggtgtggtgttgggcagtgagatgtcatcgggaatacagcatgttttcgtagagaattgcacttacggaggctattgtaaacgaggtatttttatcaagacgaatccggaccgcggaggttttattcgtgatatttatgtgaataattgtgagtttggtgaagtggaggatcttttttatgtaacttccatgtatgcaggcgaggggatggataaccatcattttactgaggtgcatgatatttatgtaaaggatttgaaatgcaaaaaggtgaatgtagctgcattggtgcttcaaggtacagaggcaaagcctatttataatgtgacttttgataacgtggatgtggataaagcagggataggtcttagtttttcgaatacgaagacaattggggtttctaattgtaatttgggaggttatgttggggtgccgtctacagccagtgcgaaagatggtatattcaataaatagatttgtttgacttcttggttcacttcgccgattccttgagaaagtcttgttacgctggaatgacagagtaaaaggaaagcaggaaactgttttcggacagactggggaggatttttcatccctcagctaaacaaatgtttttatagatggttctataagtaaaaaagacgataattatgaatacaaatgaatttgcccgaattttattgacttggattaagagttttctatcatggataggcatcccgcgcgataggttgaatgaactggatgagattattttcttgatcctgattgtagttattgcttttgctgtaggagctgtatttcattatttatctgtgcgtttcacacggaaggtgttgaaatataaaaatatcagttttttaagttcgctgatagaatacaatgctttgcggaaaatgtctgcggtcattccgccgcttattatatccgctttgttgccgtttgcgttcgattatcgttctacttggtttactgccagtgaaaaaatcacttggatttatttctttatcgctttgttgttttcggtcaatgccgtgttaaattcggtgggtaatgtgctgatgaacaaggagcagttacagaatcgtccgatgaaaggtttcatacaaatctttcaagtgattttttcgtgtattgccatcattgtcatcatttctatattgattaataagtcgcctctcaatctgattaccggactgggtgcttttgctgccgtgctgatgttgattttcaaagataccatccttggctttgtggcgggggtgctgctttccgagaatgatatggtgcatatcggcgattggattgagatgcctcagaataatgtgaatggggtggtgatggatatcactctgaatattgtgaaggttcagaatttcgataatactattgtcactatacctccttattcattagtttccggttcatttatcaattggcgtgggatgactgaatcgggcggacggcgtattatgcgcgagtatgcgttgaaactggattacatacaaccctgtactcctgaatttttggagaaaatgaagaaatttgatgctgatttggccgactttatcacagaaaagcagaaacaggcggccgaaggaaaggtagcgaatactgacaatccggccggattggtaaatggaaccattgatacgaatgtagggctgcttcgtgcttatatgactctctatctgaagcgccatccttttatcagtaaggacctgttgctgatggtacgcacgttggctcctacggagaatggtctgcctgtacaaatttattgtttctcggccaataagaactggcctagttatgaatctatccaggcggaaatcatggagcattttgtttctgttcttcccgagtttggattgtatccgttccagaatcctactgccagagattatgtaatcagtggtttgatagagtctggcaaggacctttctactgtagacggaattccttggcattcggtcttgccaaaggaagaaaaggtatagttagggatttaaacatttattaatgacttgcggttgaacaattcttgttgccgccgtgttatataaatgtgtttttcatagtattagattaaaggttgaagattgcaatcggcttgagagaagtagttgcatctgaagtagaagcgtctactataaaaaatatagaaaggttgttccttacgggacagcctttttgttttgttaaaagaaaccattcgcattaacttgaaatgttaaaggatttgttgcttttattaaacaatactataatttctccttaacgcttccttaaatttgcagatagcaggaaagtgcgtatatttgtatgtgtgtttttcatagtattagatttaaggttaacaaaaggttggagcaaggcgttgctcctttttttatggaataacgtgaggcttacatctgctgtccggttccgatacccaatacagaaccacagagaagaatccgtgcaatgtattcctctccgtgactgtgtaacttaattctgctctttaatgcaaggagaaggctgaattaaataatctcgatgccttgcttccggcataactccaatcccacatcctttaacttgaatttctgtatctttccgctgcccgtcatagggaactcatcaacaaagaagatatatttaggaattttgtaacgggctatcttgccatcgcaaaagtcacgtacatcgaattcgttcatttccaccccttcgtgcaagatgatgaatgcgcctaccgcttctccgtatttcttggaggggataccggctacctgtacatcttttattccttccatctgatacaggaactcttctatttcccgtggatagatattctctccgccacggataatcatgtcttttattcttcctgtgatacgataattaccttcttcgtctttcactcccaaatcccctgagtggagaaagccgttccggtctatcacttcggcggttgcttcggggtttttgtaataccccttcatggtgttataccctttgttgtacatctcgccttgtacgcctatgggacattcttcgcctgtttccggatcgatcacttttacttccgtaaactcgaaatcacggcccactgtgttgcagcgtacatcaaacgaatcgtcgatgcgggaggctgtcatgccgggagaagcttctgtaagcccgtatacactggtgaccttcataaacattttctcttctacacgtttcatcagttctaccggacagagtgagcctgccataatgccggtacgcagactggacatatcgaacatatcaaacatgggatggttcagctcggcaatgaacatggtaggaaccccgtataaggccgtgcagcgttccttgtggacggaggcaagtaccagcagtgggtcaaagcgttccaccattacctgcgtacacccgtgtgtaaggcagttcatggtggctaacaccactccgaagcaatggaacaggggtacgcagacacatagtttgtcatcggaagtgaatttcatgtgctcgcccgtcaggaaaccgttattgctgatgttgtaatgggtgagcatgactcctttggggaaaccggtcgtgcccgaagtgtactgcatgttcactgtgtcgtggcagtccaccttcgctttcgcttccagcagctcgtcatcgtctatgttgcatcccagaagcagaatctcggcggtgttgtacataccccggtatttctcggggccgatgtaaatcacgttcttcatgcaggggaagcgtttgctcttcagatatccgcgctggctggtctttagttcgggcagcatggcgtagaccatatttacatagtcgtcattgccacggtctccgtttacgatacacagcgtgtgcatgtccgagttctggcagaggtattccagttctgcctgtttgtagttggtatttactgttacggccacggcaccgattttggcgcaagcgtacagaaaggtcagccagtcgggcacattacccgcccagattcctacatgggttccccgcttcacgccgatggctagcagtcctttggccatgtggtctacacgttcgttaaattgtttccaggtgaagcgcagattacggtcggaatatacgatatattctttattgggggtggtgagggcccaatgttcaagccagtcaccaagggttcttgtgcttaattccatcataaatcaaataggggtatagataacggccaatattttggcggcttgtccttgatatccgtgtacgtggtgcggaacaatagaatcataataaatactgtctccggctttgatcagatggcattttttaccatggcatacttcgatggtgccttccatgacatagataaactcttcgccttcatgcgaggagagcgaaaagtgggtttcctctgtcggttctacgtccacgatgaatggttccatatgcctgtccgcttttgattttgacagtgagtggtagcgcatatgtgtacgcaggtccattgcattgttcgagaaactgatggtatcctcactctcttgtttccggcagattactgctccttgttcttcctggtcgtccagaaaagtgcccagacgtacccctaacgcacgggctattttgatgaggggagccaatgaaggaagatctacattattctctattcgttctatttgttcttcggcaaggcctgagcgtacggccagttcggctacactgatttcttttgtttcacgtagtgattttattttttcaccaacaatctttgtgctgtccatggtttgtttttaataagtttgcaaagtataaagtgcaaatatataataaaaaagaattggacagtctatttttgttctgaatatgtaaaaaaggtaagttagtgacgaattgccggtcatttatcattaatagtcggtaagtttcgaatatttgtgttttttgttctatctttgttctcgaaacttaattaaagactaaaacttatgttctcagggattgtagaagaatatgcggaggtggtgcgtattgtaaaggagcaggaaaatctgcacctcaccttgaaatgttcgtttgtggacgaactgaaaatagaccagagtatctctcataacggcgtgtgcctgactgttgtcagtttgcagggtggcacgtacacggttaccgccatgaaagaaacgatagagcgttccaacatcggcttgttgaaagtgggagataaagtgaatgtggaacgcagcatgatgatgaacgggcggctggacggtcatattgtgcaagggcatgtggatcagactgccgaatgtatggatataaaggatgctgaagggagctggtattttactttcagatatgcgtttgacaaggaaatggcgaagcgcggttacatcacggtggacaaaggctcggttacggtgaacggtgtgagtctgaccgtttgtaaccctacggaggatactttccaggttgccattattccttatacttacgaacataccaatttccatacttttaaagtgggaagcattgtgaatatagagtttgatatcatcggcaaatatttaagccgcatgatgcagttctcctgattctttcaccgcaggttgcacagatgattgttaaagatgaaaaaaaggttctttgtggaaatccggaattatccgcatcggcttttgaacaaaaaaagaatctgtgcaatctgtggtaaaacaaatatcagaattataaatcttttagcaatatcttactggtgcttttataatattcttcgcgggcattggtcaatgcctcccaaggaccgctatatcgttcccggtctattttgaaggcttctgttccggctatgtccagtctgttcagcagcatagccacgttcatccggttgatatctactgacggcaaatagcctatgctttcatcgtcaccgtccatagaagtttcgtaaaccatgtgcatgtcctgtagttcgtataggattttcttagtgagtcttatcgggattttatgttcgtcgctgagtgtctcggcggtataaggagtctcttccgtttcaaatcgtttgcatatcagagacatgatgaggatgcacagaaagtcgtgataacggcggctgatatttgccgtctctttgctgaagctgtagttgcgaagattctgtgccacatagcaaagctctgcgccatacaggcagattccccatgaaatttgcgcccataacaagaacattggaatagcggcgaaactaccatagattgcattgtatcttgatacccatatctgactgccgatatacaagtattgaaaagcctgaaaggcagtgcctgcgatgatacccggaatgatggcatatttcagtttcactttagtattgggcataaagacgaacagccccgtgaacatggcccaagtcaggatgaaaggaaccaggcgtaccagaaatttcatcaggggtgccagtaatacgaagtcctccatgtttttcaccatggtggacataaagatggtaagaccactggaaagtacgataagtaggggtaacaagagcaggatggagaaataatccgtcattttgcgatacagcgtacggggtttcttcacttgccatatataattgaaggtacgttctatgttataggttaggctcaaaatggtccagaacaacattaccagacccactccgataaaaaccccgcttttggcgtgcaccagataagagtcaatcaggccgagaatggtttcggcagccgcactctgtccttcaagaccgctacggaactgggtttccagcaggttggagaaaccaaatccacgtgcgatggcgaatagaatggccagaatgggaatgatagaaagcagggtgctgtatgtcagtgcggatgctttattcaaaatacgtccctgagtgaactcacgaatagaaagagtggcgatttttattgcattatagagtattcctcgggatttgctaacctcgtcttctgtcactcgccatatatcatctttgagaaacgattgcagacctttcagtttttccttgttcatggtactcataagctctttattaggatatatgaaaaaaagcagccggcctgtaagccgggttctgttcctcgccttgcggcgaagtgcctgccatttatctacgcctgttgtcaccaacaggctctagcggtctaccctccgacgtggggcgagcaaccctcataatgtcggtttacatgaccttacaactcctaagacgtacagcccgtcatgtcaccatgcggctggtgggctcttaccccaccttctcacccttaccccgtttcccgtaggaattgtggcggttgttttcttctacgttactccaccttcgcagatggctttctgttaggaagtaggatgctctgcgttgcccggactttcctctttcgctttgcggcgtcagcggcagaccggccggctgcttttaagtttacaaagatagcgattttaggttaaacgtaggataataaagcggaaaaaagtaagaaaataaatgaaaaaacaaagaaagagcggaacagcccattactttttcttggtatatataataaaagaggagaaaatcagtgatgctcggttcggcactcctgcttattgtatagaaacaacggtaaaaacaggaagaatatttaaaataaatgaactgtgccggaaagagaagtgggtgctgttttcactttccctctccggacacggaatttagcggtagaatcccaattcgtttctcaatgaacgcacttcctgttgcaaaagttctatacgttccagcatgtggtggatggcgtcgattcctgcaatattgatggacaagtcataatataaatgcgtgtaacgctccagctccgctagttgggatgcggggaggtagcgttcctcgtcaatcacccggacttcgatcagtccgtcttcttccagttccgtaatgaacgacgggtccacatggcaacggtcgcaaaaatcgttgataataattaaatcgctctgcataatccttctctttttttaattgctactatcttttaattggcggaacaactctttctgatgttcggtaaggttgctaggaatggtgacattataagttactatcagatcgccaaatttgccttcttccttgtaaacaggaaagcctttgcctttcaaacggactttggttccgttctgggtttcaggttttactttcagttttaccttgccgttcagtgtgtccacggtttcttcaccacccagtacggcggtgtagaggctaagcggagcatcgatatataaatcattccccagacgtttgaatacaggatcgtctggaatgacaaaggtgatgtacagatcgcctgcaggaccaccgtttactcccggtgcaccatgaccacgcaatttgatagtctgtccgttggctatacctgccggaacagtgatacgtatgttctttccgtttacattaagcacttgtttgtgtgtttcggcggcttcacgcaatgaaagttgtaattcagcattatagtcctgtccacggaatccggcacttcgtctgccgtttgcaccgccacgatgtccgaacagttcttcaaaaaaatcagagaagccacctgtgctgccaccgaaatgtgcaccgctgaattcttctcctccattgccggaataccagtaactgccgttaccgtccgtaccgaatccgcttccggctccaccaaatcctccgaatccaccggctcctctatattgttgcttttgtttttcaaattcgtcggcatgtttccagtgttcaccgtattcgtcgtatttcttacgtttttccgggtcactcagtacttcgttggcttcatttatctcctgaaacttatctttggccctagggtcattcggattcaggtcaggatggtatttgcgggccagcttacggaaagccttcttgatatcatcttgggtggcgcttttgtccactcccaatactttgtaatagtctatgtaagccatattatatatttgttaaatttcatctgctttaagggaaacaaaatacatgccaattggttgtgttctgtttttattttattatctttgcagcgaatttttagaaattattctaaaggaaatgaggggattggcaatcatattcaggttttttatgctattagtcctgctgcttcctgtggttgctctgtgtcctgtgaaggcggaaacaactctggaagggcctatccttattgtcacttcttataaccccgaaactcgtagtatttctgacaacctgtctgcttttatggatgaataccgacagcgtggcggcaagtatactccgatcatagagagtatgaactgcaagaatttgtccgaggcttatctgtggaaatcgcgtatggcctccatccttggtaagtataaagggaaaaaccgtccgtcactggttatattgctggggcaggaggcatggtcggcttatatttcacaagacacggagatagctaaaaagactccgtccatctgtggtatggtcagtgtcaacggactggtattgcctgatgatagtatcgacacacgggtatgggaacctgaaagtaagaatatttatacggatttcggcgattataatattgttgccggttatgtatatgaatatgatgtcgataaaaacatagagttgatgcgtcgcttttatcctgatatgcgccgtgtggcatttatatcggataatacctatggcgggctgtctatgcaagccttggttaaaaaggagatggagaagtaccctgatttagagacgatttggctggacggtcgtacggaaacctttatggaagtgagtgaaaggatgcgcagattgcctcaaaatacgtgtgtattgttgggaacatggcgtgtggactgtacggagagttatgttattggtaatacgacttatatgctgcgtgatgcgaatcctaccctgcctgtgtttactatcgcatctgtgggattgggacattgggcattgggaggatatactcccgaataccatgcggtaggaaagaatataggcgcggttacttatgattttttggataaaggagatagagaaggggtggacttggtgactattcccggaaactatacttttgatataaagcgtttgcatgaattcaaattggattcattgaatcttcctcagggagcggtgttggtgaacaagactccttcgctttatgagcagtataaatattgggtcataggggttgtttcggcgttcatgttcctgatagcctgtttcttgatagccatatattatattatccgtatcaaccacttgaaacatcatctggaagtgtctggcgaggagttgttggtagccaaggagaaagcggaagaatccaacaggctgaagacagcttttctggccaatatgagccacgagatacgcactccgttgaatgctattgtgggattttccagcgtgttggtcagtgatgattcctctcctgccgagaaggcgcagtattgtgatatcattcagaagaattccgatttgttgttgcacctcataaatgatattctggacatctcgcgcatggaatccggaaaaataaaattcgtatgggaggaatgtgatgtagtagagttgtgtcagacggctttgtctacagcggagtatggacgcaagaccagcgctttgtttctgttcgaaactcctgtaacttcgctggttatcaagacggatgcccagcgcctgaagcaagtattgattaatttgttgtccaatgccgctaaatttaccccgtccggttctattaaattggcgattgccatagacaaacagcatcaacagttggaattgtctgtgtcggataccggttgcggtattccgtccgataagagcgacagggtttttgaacgtttcgagaaattgaatgaatattcccaaggtacagggctgggattggccatcagcaggctgatagtcgagaatttgggaggtaagatatgggtggacaaggattataccgaaggcgcccggtttgtattcacgcatcctttaactaaaaaagaaaaagaatagagatatgaaatatagaatatgtatcagcgccctgctgttgtgggcgggtatgcaggtgtctgcatccaataatcagaaagaagtggttatcaagattatagaaaccagtgatgtgcacgggaatttctttccgtataactttatcgaacggaaagaatggagtggaagtcttgcccgtgttcattcctttgtgaaagagcagcgtgagaaatatggggataattgcctgttgatggataatggggatatcctgcaaggtcagcctacagcttactattataattttatggataccgtgtctacccatgtggcggcggatatgatgaattatatgggatgtgtggtaggcaatatgggtaatcatgacgtagagaccgggcatgcggtgtacgaccgttggataaaacagtgcgattttccggtactgggggctaacattatagacaatgccaccggaaaaccttatctgaaaccctacgaggtgttggagcgtgacggagtgaggatagcggttctgggtatgattactccggccattccttcatggttgccggagaagttatggagtggcctgcattttgaggaaatggagccctgcgcacgtaagtgggtgaagattataaaggaaaaagagaaccccgatgtcattgtgggattgtttcatgccggaaagtcgggcaacgtgttgggacaggtggtggaagatgcctctatggatgttgccaaacgggtcccgggctttgatgtggtgctgatggggcacgaccatacaagggaatgtgtaaaggtgcagaatgtggcaggagacagtgtgttggtcattgatccggcaaacaatgccaatgtggtttcggatgtgaccctgaccgtaacaaagaaagacgggaaagtggtggcgaagtcggtggagggcagattggcggatatgaacaagtatcctgtcagccaggagtttatggataaattcgctcctcaatataaggctgtaaatgacttcgtatcccgtaaaatcggtactatttcacgtaccatcacagcgaaggatgcttatttcggttcttctcctttcatagacctgattcatcagttgcaattggaaatttcgggtgctgaagtgtccttctgtgctccgttgtccttccgggcagagattaaagaaggagacatctatgtgagtgatatgtttaatttgtacaagtacgagaacatgctgtatgtgatggaactctcgggcaaggaaattaaagatttcctggaaatggcatacgccatctggactaatcagatgaagagtcccgaggaccacctgatgcttttcaaggagccggtagaggagggaaagcgtgctaatttcaagaatttcagctttaactttgattctgccgcaggtattaattatacggtggacgtgaccaagccggcaggagagaaaatcacgattcaaagcatgtcggacgggactcccttcagtatggataaggtttataaagtggctttgaattcttaccgtgggaacggtggcggagatttattgacccttggagcaggaatttccaaggaagatttggcaaaacgtattatttttgcaaccgataaggatttgcgttattatctgatgcaatatattgagcaggaaaaagtgctgcatcctcatgccatgcaccagtggaagtttattccggaggaatggactgtgcctgccgcaaaaaaagactatcaattgctgtttggcgaggaaaagaaataatagttgagcaagagaaggtacataatagccccgttattactgctgacgctgtttttaacgtatcaggtaagcatcaccttgtttacccacgttcatattgtgaacggggtgatgattgtgcactctcatccttcgtccggcaaacaccatacgcataccacaggacaggttatttctattgctcatctgagcactattcatactttggaggccgaggttcaggccgagatgactgtattccgtcctttgttgtatgttttggaatataagataaatactttccgcgcgaaagcgctttgcgcgcaatgtatccatttgcgcgctcctccttttcattgctgaaacaaaggtatatctgttgatggaatacattcgggcaatccctttagcagatgggaatgtgtttttgccatagggctacacacattctttattgaataaaccgaaacattttagtaatagaaaaaaatagatgaaacaatatattctgttactcgtgctcatggtgatgggtgcgggtatcaatgcgtatgcagaagatgtaaatcctgtgaaggaaggcaatgtgatttcaggtcatgtagtggaaaaaggcacggagaacagccttccgtatgctgccatattgattgtggaaaccgggcagggtacggtgagtaacgaggacggtgagttccgtttcaagaaggttccggcaggaaagtacacattgagggttcagctactgggctatgagacacaggaaaagaaagtgaccgtcagtaacgacttcacggtagatgttcattttttgatgagtgatgaaagtattatgacggacgaggtggttgtatcggccaatcgcaatgagacaagtcgcaaggtggctccggtggtagtcaatgtgatgaatgccaagctgttcgaatcggtgaactctaccgatttggctaaatccttgaattaccagtcggggctgcgtgtggagaacaactgccagaactgcggcttccctcaagtacgtatcaatgggctggaaggaccttattcgcaaattcttatcaatagccgtccggtagtcagtgctctgtccggtgtatatggcttggagcagattccggtgaatatgatagagcgtgtagaggttgtccgcggaggagggtcggccttgtttggtgctaatgcagtgggcggaaccatcaatatcatcacgaaagaccccatcaacaattcatttcaagtttcttcaacaatgtccaatatgaacggcaaggtgtgggaacagtatatgggagccaacgcctctttggtgtcaaaagacaatacatatggcatcgctttgtatcagtcttatcggaaccgtaatccgtatgatgcggacggggacggtttctcggagttgggaaagctgaacatgaatacgttcgggctgcgtacctattaccgtcctacgcagttcagccgtatcagtctggaatatcataccacgaatgagttccgtcgcggagggaataaatttgatttgcagccgcacgaaacggatatcaccgaacagactaagcatgtcatcaatagtggcggattgagttatgatctgttttggaaagaatacaagcataagctttctttctattcttccatccagcataccgaccgtaacagttattatggtgcgcaacaggatgcgaatgcatacggaaagacgaaagacctgacttgggtggcaggtggcatgtatgtgggtaattttgagaaagttttattctctcctgctacttttaccgccgggttggagtatcagaacaactccctgcacgatgttatgaccggttatcaccgtgatatgaaacaggatgtgcgtattgccagcgcttttgtgcagaacgaatggaaaatgaatcagtttgtattcctggccgggttccgtctggatgaccataacctgattgacaatcctatcttcagcccccgtctgaacctgctctacaaaccgagtgacaaactacaggcacgtattacctggtctaccggtttccgtgcgccgcaggcatacgatgaggatttgcatgttaccgcagtaggaggtgagggcgtgcttatcaagttggcggaagggctgaaaccggggcattccaacagcatcagcggctccattgactggacggcgaatatcggtcatttccagaccaatttgttattggaagggttctataccggattggatgacgtgtttgttctggaggatatgggccatgacgagaacggtaacaaggtgaaggagcgtcgcaacggtaacggggcacgtgtgtatggcgtgaatctggacggaaagattgcacatggacgtgatgcggctttacaggtgggcttcacggtgcagcgcagcgaatataccgagctggaggcatggagtgagaatcctgaggtagcgccggtgaagcggatgccccgtactcctgactattacggttatttcacattgacatctgctccgttcaagaatttcgactgctccttgtccggtgtgtacacaggccggatgcatgtgccgcatttcgcaccgacagagttgcccgaggaatatataggacaatatatcgctaaagatgaaatggtgcatactcctgatttctttgatttgaatgtgaaactgaattacacatttgtattgaatgaccatatcaaattgcagttaaacggtggagtacagaatatttttaatgctttccaaaaggatttggacaaaggtggttatcgtgactcgggttatttttatgggcctacacagcctagaacgtattttgtggggatcaagattacgaattgaataatctgctgatttgtcaatgtgctaatatgtcaatggggtacgctttgttccgcatggcacattagcacattgtcacattgacaaattaacagattgatttattaccaactactgacaagtgactatacttttctgtaatccggaatcccggatcgggataattatataagggaaagcggtgttctgtttctccttccatatatttccacagactggcatattcttctttcttctcgcccatttcctgcaattgcagcatatattgccagatagacttgttttccttgatgtatattttttccatctgatgaataatcggactatgctggcgggttgggtcatggtcaaattccagtatccgttttccctcttttgtcataccgatagttacgaaagtcatgctcttgcctatacccggcaggttcagtacgctgcggtctgttgctacgaaaggaatctgatggaaggtgcagaaacgctgtacggctgccgcacggtctttacagtttctcaacaggttcaaaaactccttttcttgctctgcggaaagttttccccatcttttttcctcttctttctcctgtaaggaacggctgttcggtgtgaataccgcatagttctcttcaaaaccttttaccgagaaagtgtagtaacacaatacacccaatccgttcaatactttgcgcagcttggcggtatgtccgcgacgggaagccgccacattatatactagctggttggtgatagtccacccggctgccagtatcttgcggatagcttcacgcgcttcgggtgttacttccagtggagtctggaaatgcgtttgaatcagaaattgtctgacccctacggcagatgccttttctttgaactcacgtaagatatccaatagttcgtcattgattcgcatgggcagatataccgggagccggctgcccaggcgtactcgttgcagttccgcatatttctctccttcggcgcggtgcaggtttgcgtttcgtttgcggacagccattttgtagacggcttccaatatattgcgcaaggtcttgttctggctcatcaatgcatcgcctcccgtaatcaggatatccctgagctgagtgtcgttctcgaaatattccatcagttttctcaacctcttgtcccagctctctttcggtttcaattcctcgaagttgaagttcagacgttcactttggaagtcgtacatgcgctggcaggatgcacacaggccgccgcatgcacgtcccatcgagtcggggataagaatggccacatcgggataacggcggtgaatgttgtgtccgtccggcagcagccatcctgcagcgttaggctttccgtcctccacagcatcttctttttcccatgcgtggatgttaccgtatgtttccaccagttggggagagtacagaatatagcttcgtatggctgtatcatcatatcctttccccgtaggattcaacaaagacagatagtaaggggtgataaagacaggcattcctttcttgcgtgctttgtgataaagctgcaaggtctcttcggatagggagttgcctagcattcggttcagttcggtagggctttttatggccattgccagatgaaaacgggcttcgttccaccattggcagaccagctggcgtttgtcctcttccgtgcttccttcgggaaaaagatagcgactggagggcgcgtgtctgttttctattttctggataagaagggagataatacgctctttgttttgtcggcggatagcccggacatcctcattcagtccgctgggccagcgtttcatccattgttgcacttgtttttcatcaggtagttcctcctcttcgtgataaagccggtcaaactggtgatacaggtcaatccataaatcaacggaaatctcttcattgatgatactattcgttaaaaacttccaaagcagtgagatggtttctattttaatctcctgttctgtagaggcttcgtaaatggtttttccatcgttatctatcagtcttttaatttgccttgcggcagcaggattgtaaataggaccggataatagataatcgttcagcttgtttttgaaagctgtttcatcctggctttctgaagccaatgaagtgagttgggttaatcgggtttcgaatagtgttttaatgccatgggtggataacatcttattcttttgtttcataagcaaacggttgttaaaaaagtgaatactataaataacatatttctcgtagaaaagttatcaaactgttaacttcatgctgctaagatagtaaaaaagcttcttttatgcaaattccttaacaaaaagacgttttttataaatagcattattttatagagtacatttgctttgtgctttcgtctttttttaaagcccggagcttttatcgggaaacgaagaaattcgtaattttgtagagctttgcttgtttgcaggccaatcaagctgaagagaaacctcattttaatagatggaaaaacaacatagaagtaaataaatggaactgaaacaactttttacctttgcagcagcctgttcgctggcactttcggtgtcggctcaagatagagtacactatacaggcacagagctgtctaaccctacctatcatgacggacaattatcacctgtggtaggagtacacaatattcaggtgatgcgtgccaaccgggaacatcctgcacccgataacggcaatggatggacatacaatcatcagtccatgttggcttattggaacggacaattctatatgcattatctttccgatccatcagacgagcatattcctccctcacagactttcctgatgacttcaaaagatggataccactggacaaatccggtgactcttttccctatctaccgggttcccgatggctataccaagcccggacgcacagacaaggcgaaagatctggatgccatcatgcatcagcgtgtaggcttctatgtatcaaaaagcggtagattgatagctatgggaaactatggcgtagctctggacaagaaagatgacccgaatgacgggaacggaataggccgtgtggttcgcgagattaagaaagacggttcgttcggtcccatttatttcatttactataaccatgcgtttaatgaaaagaatacatcctatccttattttaaacgcagcaaagacaaggaattcgtaaaagcctgtcaggagattctggacaatcctcgttaccgtatgcagtgggtggaggaagctgaccgtaatgacccgttgattcctttacacaaagaatacaaagcgtattgtgactatactttgcccgacggtcgtttggtaagcttgtggaaacatgccctgacttccatcagcgaggatggtgggaatacgtgggcgcaaccggtggaacgtgcgaaagggtttgttaacagtaatgcgaagatttgggggcagcgtttgagtgacggtacatacgccacggtgtataatccttccgagttccgttggccgctggctatctcgctcagtaaggacgggctggaatatacgaccttgaatttggtgcatggcgaaattacaccgatgcgttacggaggtaattataaatcattcgggcctcagtatgtacggggtattcaggaaggtaacggaactcctcccgatggtgatttgtgggtgacttacagtgtgaacaaggaggacatgtgggtttctcatatccctgtgcccgtccgcgcacatgccagtgcacatgctgacgataattttgccaactataaagatttgaatgaactgaccgactggaatttgtattctttgcagtgggctcccgtatcattggatggaaaatggttggtgctgcaagataaggatttgttcgattatgcccgtgtggagcgtaagatacctgctacaaaagagcttaaagtttctttcgaactgatggcggagcagaacgataagggccttttgcaaatagaattcctagatgaaaacggtattgcctgttcccgtctggaattgacttccgacggacttttccgtaccaaaggaggtgcgcggtttggtaatttgttgaagtatgaaccgggcaagacgtataaggtagaagtggaactctctgttgctaaccgtatggtaaccgtttacgtggatggaaagaaagcaggacaacgtatgttctttgctcccgttccggccattgaaagagtgatgttccgcaccggagcgcaacggacttatcctacggtggataccccggcagactggtatggcattctgccgaatgcaggtgagcaagaacctttgtgcacctatcgtatagccaatttcaagacgacttctgccgataaggatgccggtgcggctttcttgaaatataaggatttcaagccctacgtggattatttcaacagcatggaggatgagaatatagcccaggctgttcccaatgtccgcgcatctcaatggatggaagaaaacatacctcttttcgagtgctctcaaaagaactttgaggaaatgtattattatcgttggtggacgctgcgcaaacacatcaaggaaactccggtgggctatggtatgaccgaattcttggtaaaccgttcgtatgccgataaatacaatctgatagcttgtgccatcggtcatcatatttatgagagccgctggttgcgtaacccggaatacttgaatcagattatccatacttggtatcggggtaacgaaggaggcccgatggccaaaatgaccaagttcagctcgtggaatgcggatgcggtactgggacgttacatggtcgatggaaacaaggaattcttgttggatatggtaaaggatttggaagcggaatatgcccgttgggaaaagacaaaccgcctgtccaatggactttactggcagggagatgtgcaggatggcatggaggaatctatcagtggaggtcgtcgtaagcaatatgcccgtcctactatcaacagttatatgtatggcaacgccaaagcgctctctcttatcggcatcatgacaggagatgagggcatggccatgaaatatggattgaaagccgactccattaaaacgttggtacaggataagttgtggaacacagaccaccatttctttgaaacgatgcgtggagatgcgtccgccgaggtacgcgaggctatcggctatatcccttggtatttcaatttgccggatgcttcttcccaatacgatatggcatggaaggaagtgatggacgagaaaggtttttccgcaccttacggacttaccactgccgagcgccgtcatcctgagttccgtacacatggcgtaggtaagtgtgaatgggatggggctatctggccgtttgcatctgcacagactttgactgcaatggccaatttcatgaataattatcctcagactgtattgacagacagcgtgtatttccatcaaatggaacgctatgtggagtcgcaacatcatcgtgggcgtccctacatcggcgagtatctggatgaggtaaccggttattggttgaaaggggatcaggaacgcagccgttattacaatcattctacttttaatgatttgatgattaccggtttgataggactccgtccgcgcatggataacacagtggaggtgaatccgttgattcccgaaggaaaatgggattatttctgtttggataatgtgttgtatcatggccgtaacctcactattttgtgggataaggacggtagccgttaccagcgtggaaaaggtctgcatatctatgtggatggaaaggaagtaggacatgccgatacattgacccgtgttctttgtgagaatgtgctataattttgaataaaggggatgtcttaagataataaatagactgttgaaagaaaaatgaattacagaaaattcttaatagccgctttgttagttatgtctttctccgtgcaggcgaaagacataactattacccgcctgacgtgtgagatgcgcgaaggaagagtgaccatctctgatgcccctcgtttgggatggcagatgagttcgccggaaaatggcacgcggcagactgcttatgagatagaggttcgggatgtatgggcaggaaaagtagtctggaacagtggcaaagtaaaatccgctcgaagccagttggtttcctgtgcggatgcggccttggagaaggacaggcattatacttggcgtgtccgtgtctgggatgaggctgatacgccttcggcatggagtgcgccctctgatttcagtatcctgacttccgaagcggctttcgccggcagtgaatggattggggccattacccgtaaggatgcccgcatacccgaaggccggaaatatcatggcagtgagctgaaaaagcctgaggcaaaggccgcctgggctgctgtggatactttggcaaagaaaagtatttatctgcgtcgcgagttccatgtggcaaagaaagtgaaagacgccacagcgtatgtatgtggcttgggcttttatgaattttcgctgaatggagaaaaagtgggagacagcgaatttgcccccctttggagcgactatgacaaaagtgtctattataatacttatgatgtcacctcgcaagtgaagaaaggcggtaacgctatcggagtcctgctgggaaatggattttacaatgtgcaaggcggccgctatcgtaaactgcaaatcagtttcggcgctcccacgcttcgtttccggatggtggtgaattatgaagacggaaccagtgaaacgattgtttccggaaaggactggaagtacgatttcagtcccgtactgttcaattgcatctatggcggagaagattatgacgcccgccgtgagcagaaaggctggaacatgttcggttttaaagagcaggattggcgtcctgtcgtgattcaggaagcccccaaaggggtgcttcgtccgcagatagcgcaaccggtgaagattatggagcgttatgatatccggaaaatgaccaagctcaccgctgaacagataacagctgcctgcaagtcaaccaaacggacagtagatccgtctgcctttgtgctggatatgggacagaacctggccggtttccccgaaattaccgtccgtggaaagaaagggcagaaaataactctgcttgtatccgaatccctgacggacgaaggagcttgcaatcagcgtcagaccggcagacaacattattatgaatatatcctgaaaggggaaggagtggaaacttggcatcctcgtttttcttactatggtttccggtatattcaggtggaaggcgctgtgctgaaagggcaaaaaaacaccttgcatcttccggtgatccagaagatacaatcgtgctttgtttataattcggctcctaaggtatccacattccaatgttccaatcgtatattcaatgaggcccatcggctgatagagaaggcggtgcgaagtaatatgcagtccgtgtttaccgattgtcctcatcgcgagaaactgggttggttggaacaagatcatttgtgtggtcccggtttgctttacaattatgatttgacaggctttgttcctcagactcttcagaacatagccgatgcacagcatgccaacggcgcggttcctaccactgctccggaatatgtggtgttcgagggtcccggtatggatgcttttgccgaatctcccgaatggggatgtacctttgtggtattgcctttcatgtattatgagacgtatggggatgattcattgattagaaaatactataacggaatgcgtcgttacattgattatatgactactcgtgccaatgatggaatcgtttctttcggactgggcgattggtatgattatggagatttccgggccggattttctcgtaatacgcctgttcctttagtagctaccgcccattattatatggttgttcgctatttggtggaggcggcacgtatgctggataataggtatgatgtagcatattacactcatttgggtgaagaaattaataaagcattccatcgggagttttatcataaggatactcgtcagtatggtacgggaagtcagtgcagtaatgccctgccgttgtttctcggaatggttcctgccgaagataaacaggcggtacttgataacttggtagcggatataaaacgtcatggtaaccggctgactactggtgatgtgggaaatcgttatttgttccagacactagcccgtaacggactgaatgagctgatgtacaccatgcataaccatgaagaggccccggggtatggtttccaattgaaatttggagctaccacgctgaccgagcaatgggatccgcgacaaggttcttcgtggaatcactttatgatgggacagattgacgaatggttcttcaactcgctggcgggtatccgcaccgttgagggaaaaccgggaatgaaggaaatagaaatacgtccccgtccggtaggcgatttgacatacgtccgtgcctctaccaaaaccttgtacggaaaagtcgcggtagactggacatgcgagaatggagtctttacattgaaagtaacgatacctgtagggtgtacggcacgcgtattccttcccgatgagaaagagccgaagatagtggaaagcggaacttattcttttaagaaataaacgcagctttcataggaaaagccccctgggggtgtttggtaaaactaaaatcaattaatgaacgatatgaataaacgtacctttttaagtctgttgttatgtgtttgcagtttgtcttttctgcatgccgagcgtgtggatatgcagcaagccggtgccgatatacaaggccggaaattaaacacgacattgattaattctaccatcgaccgcttgaatgccaatggtggcggaacactctttttccccgcaggaacttatctcaccggttccatccacatgaaaagtaatattacattagaattggaagcaggagccaccttgaaattctcggagaactttgacgacttcctcccttatgtggaagtgcgtcacgagggaatcatgatgaaaagtttccaaccgttgatttacgccgtggatgcagaaaatattaccatcaagggagaaggaactctggatggacagggtaaggcatggtggactgaatttttccgtgtactggtagaccttagagataacggcaagagaaacatcaacaagtaccagcccatgttcgagaaggaaaacgacctgaaagccctttacgctgaaaccaatgaagactggcatggcacactggaccgtcgctttttccgtcctcctttcatacatcccatccgttgtaagaatgtacgggtagagggcgtgaagattatcaactctcccttctggactgttaatcctgaattttgcgacaatgtgaccattaaaggcattaccatccacaatgtgccttcccccaacacggatggcatcaaccccgagtcttgtaagaatgtacacatcagcgactgccacatttcggtaggcgatgactgcatcaccatcaaatccggacgtgacttgcaagcgcgtaaactgggtgttccttgcgagaatatcaccattaccaattgcaccatgttgagcggacacggtggtgtggttatcggcagcgagatgagtgggggagtgaagaaagtgaccatcagcaattgtgtctttgatggtacagaccgagggattcgtctgaaatccactcgtggccgcggaggcattgtggaggatatccgtgtaagcaatattgtgatgagtaatatcaagaaagaagctattgttctcaatctgaaatatagcaagatgcctgccgaaccgaagagtgaccgcactccggaatttcgtaacatctatgtttcgggtgtgacggtccgtgatgtgaatacccccattatggtggtgggcctgcccgaagcgcctattaccggtattgtgatgcgtgatgtgtatattcagaatgccaagcaacgctgtgtctttgaagattgtaaggacttggtgctggatgatgtgtatgtggatggtaaagaaataaaatagactgcccgatgaaaaaacagatgcttttgtgcatggcggcactctctttttccgctgtgtctgcacaaacttatgagacccggttcgcacgtccgttatccgatgtgttgaatgacgttgccgcccgtttccaggtccgcttgaagtatgatattgatacggtggggcgtatccttccgtatgccgatttccgtatccgtccctattcattggaagaaaccctgactaatgtgctttctcctttcgattataaattcgtgaagcaaagtgataccgtgtacaagttgaaaccatacgagtatgcacgccgcacggatgttgatggagaaaaaatgttgtcatatcttagtggcttgtatactgataaagatcagtgggaacagcgcacggagatactccgaaaggaagtgcgccaacgtctgggattggatgatatgctgaaaggaacagtgaaggatgcaaagcctattctctcgaaagtacggaaattcgatggatataccgtacagaattttgcattggagaccttgccggggctttatgtttgcggttcggtttatgcaccgcgttccaaaggtaaacatgcacttattatttgccccaatggccattttggacagggacgttaccggaaggaccaacagcaacgtatggctacattggcgcgtatgggggctatttgtgtggattatgacttgtatggttggggagaatccgccttgcaggtaggtgcggaagcgcaccataccagtgatgcgcacaccattcaggctatgaacggattgctgatactggatgatatgctggcaaaccgtaaagatatagatcctgcacgcatcggcgtgaacggtggttccggcggaggaacgcagacggtgttgcttaccgttttggacgaccgttttacagctgctgcccctgtggtcagtctggcttctcactttgatggcggttgcccgtgtgaaagtggcaagcccatccagctggcaggtggaggaacttgcaatgcggaactggccgccctgtttgctccgcgtcccatgctggtggtttccgacggaggagactggacagccacggttcctcgtttggaatatccttacttgcaacgcatctacggtttttatggtgcgacggacaaggtgagcaatgtacatttgccgcaagaacgtcatgatttcggtccgaacaagcggaatgcggtttatgatttctttatagacgtgttcggccttgaccggagaatgctggatgaaagtaaagtaaccattgaatcggaaaacgcattgaagagctttggtgagaaaggtgagaaactgccagccggagccttaagatataaagaatgattttgtcgtttatttattaggttaagagttagtgtagaatctccctcttgcatagcctgtgaaggtgagcaagggggagtttttttaggtatgggggattaatactttttgtcgggtatatcaggccttgtcatgcggactgttaagtctttttgtgcggactgttactatagtcttcggcagtggaccgtacagtctgctacagtggactgtacggtctgccgtagtgaaacatacggactactgtcgtagtctgtaaaaggtaaccgtaagaaatgctttaatggtactgaaaaaaagacttaatggagctgaagcgatgaattaactctgcatttatgttataatcatctttagttccccatccttgtggcgttttcggttgttttcttgtttatagttgcggattcaaaccggtttctacatcggatttcagccgggtataatggaaaaagcggaggttataataagataatgcgtttctgtaatatggcagcaatctgttgtctcagttgtggggcgctgatgggcttggccatatagccgtcgaagccattttccataacccgttgttcatcactggcataggcgaaagcggtaacggcgatgataggcacatccaaggatagctttcgtatttcccgggtggcctcatagccatccatcaccggcatattgatatccatcagaattatctgaggattatggagtttatacaaattgaccgcctcttttccatcccaagcatgaaccaggttatattctcgtttcaagatagattggaacagccggtaattactctcattgtcttcggcaactagaatggtcagcttgtctttctgcacggagatgggctgatgtttgtcttcctttttgttatccgcatcagcgggctggtagggaatggtgaaccagaaagtggatccttttccttcttcagattctacgccgatgcgtcctcccatgtgctctacaatcgtctggcaaatggataatcccagtcctgtaccctgtacaaaagagttcagtttgacgaaacgtccgaatatggagttcactttgtcggctggaatgccgcaaccggtatctttaacatagaaataaagttctctgccgcatagttcgtagccgaaggtgatgcttccttgtgaggtaaacttgctggcgttgttcagcaaattattcaaaacttgcatcaggcggttcttttctgtctttatggggcaagaggggagtcctttgtgtgcaatcagttgaacgccgctggtttccgtccggtaacggaccacgctctctatttcggaaataatctcgttcagctctacattggaatagctgaactccagtgtgccggcctctattttcgataagtccagtatgtcgctgattaattgcagcagtaacgtattgttactttcaatgatattgatatattcctgcttttcctgttcctcttctgcagtagcaaggatgtttgagaaaccgatgatagcatttagcggagtgcgtatttcgtggctcatattggcaaggaaagcggacttcagccggttggattcttccgcgcggttcttggctgaaagcagttcgttttccattgttttccgttcgttgataatcagtgaggaaccgactaaagtcagcggctttccgtttttgtctcttgtttctacagctgcctgtgcttctacccagtctattttccagtgtttcccatcattggccagtacacggtactcttctttcactttctctatttttccgttggccaggtcgcgatatgcttgaatcacacgcggacggtcttcttttatgattttggcgaaatactgttcgtccgatacgctcagttgttcttcactgatgtcgcccggcatggctgccatggcaatggggcgattgaggtcgcacaagatggtatggtctttcaagttccatttccaaggtacgatgttggctacttccagtgccatggaaagtttatggttcgtggcgcttagcatttgctgtgcatggtgcaactcggtgctgtccatgcagaacacatcgaccatatccggttcggtggagcaattcaggacaacatcatagaaggtgttgacggttttaaaataatatgggaatgtgatcgatttcttttctttcaaggtgatactcatgaaatgggtgaattccggtaaagattcgggaaagatttcggaggcccttttccctattatatcggattttttaaaaaaacatcgttcgaaataacggttgacatcctgataaatgctgtctataatatttccttctttatcccatattacttgttccttcatgtaaagaatcggcatattatccaccaggttgatatattgtgcgtttgtttctatttcattttgttgggctcgtctcaggactttcagcatctgaatgcgtttttgttgtgttacagccatcagtgcgaaggccatgagcacaatcaggataaaccatttgtatttgttcagaaagtggacaggcttgtcatagaaaatggtgtcatcggggcatcgcttggggtcgagccctttatttatgagtctggtatagttgaaggtggggtgtgcttcctgaggctcatagaaaggaatgtcactggctctttttccaccgaggatgtcgtcaattgttttcaataattgcttggtgaaggcttgttcattgtacatgtatcctcctaccatacctccgtcgtccatacctgcatagcggatggtgaaaagaggggcggagatgctggaaatgcttctgtaagcgtttatcagaaagctgtccgaggtgaaggattcggtgaaccaagtggataccagaaagcctgtagtcttgtctgccttacgtacagcattatataactggtgcagagtattggtgcgtgaagagatgtatttatattccagttgcggatattttgtttggatcaattcccgcagtcgttggtcatattcgggattgggataaatcccgtctcccaaaaagatgagtcttttcatgccgggaatcatttgcagcatcagttccacacttttttccagatagataggggtatgcatgtaggtgaaattgtattcttgggccagttcgctcatgtgtgtcttttctttgggagtgactgtatctctctgcctgtagaatatttcaggatacacataggggtctgccccgcagacaatagtaggtacggtaccccataaagcttgtatctcttctctgaaaatcagactcatgcttcctacaaataccaatagacggggaggggtggagccatatcttgaggaaagtgtttctgaaaacttttctattttagcagaatcgcctaccatgaataaattcagatgttctatgtaggcgtctatatttttggttccggctagtttatggacaatgggggtggtaatgctgttgctccatggagaagattcgttatagctgtttaaaatcagcacatattcttcgttcccggtacgatcctgtgcattggcagcttcacaggtgaatgagaagatggtacatatataggtatatatcagcagccattgaatatagcctatacggattctcctacgatttttatccattattgttttctactcttctttaaatatatcgctctgatgcttgtgatgaaacaaatgtactattaaatcagggagtggacgaagaaaaataaatgtttaacaaatattaaaagaaacgcactgaagtggggaacttcctgtatgtccaggtgtgaacattttaaacgggaactttggccaacttatatggcaatgatttaaaatgccggtgaaaggcaggaaaagagggaggatgagaaatatcttttgcgttatctcttttatatctgaagaaatagctttatatttatcccctcatcttattttaaggtagttatggaatatcacttaagtactaaattgaatggaaatatagcaatgacttcctgtttccatgaaaactcctttttgcaacgtgacgggagtctttataaatttatatgggtgcggcatggaacgctggatgtggaagtggatcatgtggtgatgcatctggaaaaagaggaaatgatttcgctcactcctttgcatcatgtgcagataaggggagtggacggtgaatacctcacttttttattcaatagtaacttttattgtatttacgggcatgacagcgaggtgtcttgtaacggattcctgtttaacggttcttcccgtgtcatgcgtttgaagctttcgccttcccagtcggcccgtcttgacagtattgtcgatattttcagaggggagtgtgaaatacaagacaacttgcaggaagaaatgttgcgtattattctgaaacgtttcattatcacttgtacccgcatagcccgtgaaatgtttgatgtagacccggggcgtgagaacacgtttgatgtgattcgtcagttttatgtgctggttgacagtcattttaaggagaagaagcaagtgcaggattatgctgatatgttgtgtcgttctcccaagaccatttccaatctcttttccctttacaggctttcttctcctttgcgtgtcattcatgaacgcgtggatgcggaagccaagcgcctgttgctttatacgggcaagagtgcgaaggaaatcagtgagattctgggatttgaggatttggctacatttagccggttctttaagaaaatgaacaaggagagcctttcggaataccggaaaagagagaaacgggaataattgccaacctatatgggggaattgccatttactggagagggaaaactgccgacctttgcaccaggaagttaaatcttttaataatgaaagcaatgatgacaaaattaaaatctctgtttgttgcgtttttaacaatagcagcatctgcccaaaaactgggtatcaatcttatccgtgtggcaatccttgtaatttttgtatggattggcggtctgaaattctggaattatgaagccgaaggaattgtgccttttgtggcgaacagtccctttatgagtttcttttataccaaggacgctcctgaatataaagaatataagctgaaagaaggcgaattcgatgaagcgaagcaccagtggcatgaagagaacaatacttatgggttttctcatggattgggtattttgattatgggaatcggtatcttgacgtttttaggtatcttctctccgaaaatcggtttggtaggggccggactggctattgtcatgacactgggcactttgtctttccttgtgacaacgcctgaggtgtgggtccccgatttgggaagtggcgaacaggggttccctctgctgacgggcgccggccgtctggtcattaaagatactgctattttggcaggagctgttgttgttctttcggatagtgcgagaagggtattgaaccagttgaaaaagtaaagttagaaagaccggtcacggacatgcccttttataggggtgtatatggatgtattccagcgggaggcaagtatttcctgcaagacataactatctatgaggcaagttgtatcctgtgtcatcttgctgtctgtcagctattgataatgaatgcaaatttggcagattctgcggttaacccctgttaagtgcttatctatctgtgttaaaagaggaaaaaaatctctgacaaacggtacaaccgtacaatatttgtcattacattagcgtcagaaatgttaaaccaaacttgaaattaacaaattaatagatattaagttatgaaacaagcaactaaaatggtactaggcgcagcagcaattgtagcagtcagcgcaggtgtagcaggagtaacgacttattctatgttgaaacccgagccaaacaaaagcgtggcctttaatgatgtgttccaacaaaatccgaatacaagacttgccgcgctggacgccacccaaatgcaaccggtggatttgactcaggcagcggaaaattcagtgcatgcagtagttcatataaagtcaactcaagaatcaaaaactcagacagttaccgttcgtgatccgttctatgatttctttggtgatatttttgggaatggcagaggcggcggtcagcagcgtcaggtgcagactcctgaaagagtgggattcggttccggagtgatcatctcgaaagatggatatattgtaacgaataaccatgtaattgataatgctgatgtgatcagtgtcaaactgaatgacggacgtgaatataaaggacgtgtaatcggcacagatcccagcacggatttagcgttggttaaaattgaagcggatgaacttcccactattcccgtaggcgattcggaggctttgaaagtgggcgagtgggtattggctgtaggtaatccgtttaatatgacatctacagtaaccgccggtattgtgagtgccaaggcacgttctttgggcgtatataatcaaggtgtggaatcattcatccagacggatgcagctattaaccaaggtaacagtggtggggcattggtcaatgcaaaaggagagttggtaggtatcaactcggtgctttattcaccgacaggagcttattccggatacggttttgctatccctaccagtattatgaaaaaggtaatagccgatttgaaagaatacggaaccgttcagcgtgcggtattgggtatcaagggtactccgattaatgatgaccagcagatgatgccggaagaaatcaagaagaaagtgaaggaactgggtgctaccgatggtgtgctgatagctgaggtgattgatggaggttctgcggctggtaacttggaagtggacgatgtcattatcggtattgacggaaaacgtgtgaagaactttgcagagttgcaggaagggttggctaaacaccgtccgggtgacaaagtaaccgtcaaggtgttgcgtgacaagaaagaaaaggatatcgagatgactttgaaaaatgcacagggaacaacgaaagtggtgaagagtgcgggcatggatatcttgggcgcagcgttccgtgaagttcctcaggaattgaagagacaattgaacttgggatatggtgtggaagtcacaggtgtgacagacggtaaaatgaaagctgccggtatccgtaaaggcttcatcatcctgaaggcaaatggacaacctgtcaaatcagtaaatgatttggaagatgtgctgaaagctgctacccagtcaccggatcaggtattgttcttgagcggtatgttcccgtcaggtaaacgtgcgaactatgcagtagatttgatacaggaataaggatatttttaaggtagaaagtttcaataggtaaagtttagaggatgcacggtaagggacacttccgtgcatcctgattttataatcaaacaggattgatatgctggaaagaagtattgtaaacggaatttcggggatgatgggaacacaagtttgatttttagtatgtttttatccgatagtagagtcgtgtaactattaatttgcgtcataggtgtttgcgttctcgtccggccggaaaacggaggacataaatcaattctgtttcacgataagataagagctgttgacaggatccatccttacgctatatcatggaataatctctattaagtaagctgataagatcaataaagagaaagatataaccctattttcgcaaaatatttaggaaaagaaggacaaagatagtcttttttgatttattagctaatatttttcaaacaaaaatggatgtattccatttaatgttgtaaatttgcatcccaaatttgttttatagagaatgagacaattaaagattaccaaaagtatcactaaccgagagagcgcatctctggataagtatttacaggaaataggccgtgaagacctgattactgtagaggaagaggtagagctcgctcagcgtatccgtaaaggcgaccgggtagcattggaaaaactgacacgtgccaacttgcgtttcgtcgtgtctgtagccaagcagtatcaaaatcaggggttaagtcttcctgacttgattaatgaaggcaacctgggattgattaaagcagctgaaaagttcgatgagacccgaggcttcaagtttatcagttacgccgtatggtggattcgtcagtctattctccaggcattggcagaacagtcacgtattgtccgtttgccgttgaatcaggtaggctcgttgaacaagatcagcaaagccttctctaaattcgaacaggaaaacgagcgtcgtccttctccggaagaactggccgatgaactggaaatacctgtagacaaaatctcggacacgttgaaggtttcaggacgccacatttctgtagacgctccttttgtggaaggagaagacaacagtttgttggatgtgcttgtgaacgacgactcgcctatggcagaccgttccttggttaatgagtcacttgcgagggaaattgatagagcactctctacgctgaccgaaagggagaaggatattatccagatgtttttcggtattaatacgcaggaaatgacgttggaagaaatcggcgataaattcggcctcactcgtgagcgcgtacgccagattaaagagaaagccattagaagattgagacaaaattcgcgtagcaagctgcttaagtcttatttagggtaagaaagattcggtttccgaaaagaaaacaaagcacaagatggaaggttactcccgtcttgtgcttttgttcataatataccaataatgcccattggctgcgctatgtgccacatggtaatgggcacatcagcaaattattatagttaattaatctattactttttcgtatttgtccgtaaataactatttttgtcctctaataaaacctaagttcaagcggataatgcaacaggagtgagaatgatgacaatgagaagatacgaaaagaataatttttcagaggaacagagaaagaagatttctttcccttttgttcccctgtggaaaagttgtttctttgcatcttccagttccccaacattcagttgcaatatgaaacagctaaccgaagaacaaaggtataacatttccgcttatctgcaaagcggaaagtcaagaaccgagattgccaatcttgtaggagttcatcgtagcactataagtcgtgaattacgtcgtaatagtgataaacgtaatggcatttacaaaccggatctcgctcaggctaagtatatgtccagaatgcgttcacgaaagcacttcgtgaagtttacggacgacttgaaaattcaagtagatatactcataaagaaagatttcagtccagaacaagtgactgggtttatgcgaacaaagggcttggaaacagtttctcatgagacaatctaccagtatatttgggaagataaaaagcatggagataagttgttatacaagcatttaagaagacggggaagaagtcataagaagagaggtgcattgactaatggacgtggttttatcaaaaaccgcgtggacatagacaagcgtcctacgatagtagacaagaaagtacgttttggtgatttggaaattgacacagtcattggaatgaatcacaaaggagcactattaactataaacgacagggtaactggactagtatggataagactacttagcgggaaagatgccagcccgctaactaaagctgccatcgatgccttggaaccttttagagaccaaatacatacaataacggcagataatggaaaagaatttagttttcacgaagaaattgcacgtaaactaaatatttttgtttactttgcaaaaccataccactcgtgggaaagaggagccaatgaaaacagcaatggtttgattaggcaatacttcccgaagggtacggactttagggacataaccaatgaacaggtaatgcgcgttcaaaacatcttaaactcaagaccgagaaaaagattgggttacatgaccccaaaggaaaaatataaattattaactaacaatgaattcgacactgttgcattgtctgtttgaattcaggaaattataaaattagaattatgaaatccataaagattctgtgctctttattattggtactgatggtatgctcggcattctcattgaaaggaagtaaaggtaaatccgtttatatagtaggtgtatccgcatcgtttacagattcattggtttatttcacggaaatccaattgctggacagtgtaaggctggataagaataagatgttgccggaacgctcacaatacagttatcagctgaaaaattatttggaaaacgaggaagggctgacgaaccgcacttgctttgtttatttctcgaacagcagaaagaaactgcagaagaccatcaataagatgaagatcaagtatcaaaaaggaaagaccttgctgattcgcgaagtgaaccccaatgcattcaagttcaagaaaccggaagagtgatccttttcttatgaaaaagattctatttatcctcaaatccgcaactacgcgcctaatatgatacagaagcgaaaagaatctgcatcgttagtaaaaagggggcacagtgcatcgaatgtcaccataaagacatataaatgccccttaccccaccatgcgacttgaggcaatacgcaaaatcacgactataagttgtcggtgttatccaaagtcattctggaacacattggcataagcattgttgcatgaatagatattcagcacatacttccttgatgtcctgacccatttggctggcacagagatgaacttaaagacaaacgtcttgatgcggcttgttgctttgagtccgaacctcttcacgtcaagcctcgccatgatgaatttatagaagttgcgtatgagtgccataagcagaagaaacaccgtgttttctcccataaaggattttggaagcctgttccagccgaatccgttattcatatcatcgaagatgcgttccttccctccacggaggttatagaattcgacaatctctttctcggaagactcgtagtcatttgtaaggatgcagcggtaggtgtattctccttcccacaggtcgagttcgccgtctatccgcttctgtctttgaatcacaagacggtatgccttccctttccatttctcgatgagaatggaggccagctcaaactcaatgccgcccaattccactttcttccaacctctgagggcaaagatgtcattgtagagcgaactgcatcggttagcacggatatagaaggtcttgcagtgtttagcaatctcttccactatctcttcagaacacgagccgcaatcagctctgaaacggttgataataagcttgttttgttcaaacctttcaaagaacctcttcagcgtgtccttctggtggaaacggacatttgtgttgccgtcgctgttctcaatgccgacaatcaagttgccaataaccgccacgccagggcgataaccaaggaacttcttgtatgtaggcttcgcatcaaacttctcagcctctatgaactggtggtcgaagtcaacgtcatacccctcgccctctttcagctgccctgtggacaataggcaattgaggagcagtgtattcagcttgtctgccgtgttgaagtcgtaggtcttgccagtgtcggatgtgtaggaaatgttatcctgggtcagttcctttatggctctaagaatcgtgtcggcactgcatgtgcgaagtgtcggatgaagcgaaaggtggtacatcagatgagtggtgacatcctcgatgcatgagccgccacaaaaataaacgctcataagcgaacggatgatttcgctgtattgataaccatacagcctgcatctcataccgagggttgagtcgattacagatgagagtctggagtcaaattgctccattattgaaaatattcctccaaaaggagtgagtttctcggatttaattgctacctttgccatgtctgtcgggtttgatacatattttgatttgcaacactaagataggtgaaaaatctgacatggcaaattcctgagcaactttttgttgctcaggtacttaaaaagttatatttgtaatagtgttgcggaattaaggtttatatttttaacagcctgctttttcttctcttgcgagaaggaaacaatcgtgattcctcagcaacatgccggaagaacggtcctggctttcttttgggcggataacagcttgaattccaatttgcgtaataatattcggacgatgatgcaggggcttcaggctatgaaggattcggctgctttgttggtatattgggatggtgaggcttcggatatcagttggccggagccttgtatcgttgaatatgtgactaatggtcaaggggggatcaacagtatgtccaaagaagcggtcaatgcgatgatcgcggatcaggacatgtcggttcacgacttgataagtattggcaatatcagaaaaaaatatccccctcagacatcaacggagaaaaccgtcatgcagacagtgataggtgatatgatgagtgtttatccgtcggaaagttatggaataatctttggttctcacggttcaggatggttgcccactattaccggcacccgttctataggtcaagatggcggccggtattccagtgacacagcgttgataccggaattggcggaagtgctgcgtacggtaaatcctcaaaagtttgattttgtcttgtttgatgcgtgtatgatggggtgtgccgaagtgtattatgagctgaaggatgctgccaaatattgcatcgcttctgtacttgatataccggcagccggatttccttatgcaagtgtgatgccttatttgtatgaaaatgcgatcaaggagtatttgaagccaatctgtaaagattatatagattattataactataatggttggggaaccatttcggcagtggattgcaatcagatggaaggtttggcggaagcggtcagaagtgtgattttgtccaatcaggatagcctgaagaacgtggatatagctgatttgcagcaatatggcaaaggcagcagcaacttcaaaggatatgcctatgatatgttacagtttattgaaaaattgtgtggaggaatggctccagacgattttacgcaacaattaaagaagacggtcatttatacagattatactcatgatcccacctcatccttgtacagaatagatggggataactacagtggaatgggtatgtatatccctaattcattcaccactcccaaatatttgctttggaacaattatttcaagtcttccatagcgtggtatcatgcatccggatgggctgaaacggaatctatttgggggaattgaaggagaatgcagccagttgctttttacttgatcccgaataatagatatagcggatggaagtaccgaatttccggtattcttccatttccaccgagttgtctactgcattctgcagggcttgtttaaaggcggcataatgggtgttcatataagtggcgttgtccagttctcctgtaacactgtagaaatagctcacactattatctttctcattataacgggtgctgtccagtgtaatcgtttcgttcatacgtgtggggcaggaccggttggtcttttcggctgtctgtttgaatttacggacttgtgaacggtggttattattacatcctgccaaagtaaggatgcctagggccgctattataactgtttctcttttcattataaatcggtattttgaagcgaaagtaaactataagtttgaacaaagcaaatggatttttgttttttattagtaagtttgtgcaaacaaaaaaagtaaaacatgtctcgcattatagatgaattaaaacgtacggaccacaagcgttatctgggtggtcttgatttctttaaatatattggtcccggattactggttactgtaggttttattgatccgggaaactgggcctcgaattttgcagccggttccgaatttggttacgcgttgttgtgggtggtgaccctgtctaccattatgttgattgtgttgcagcacaatgtggcccacctgggcattgtgacgggattgtgcctgagtgaagcagccacgcagtattgtcccaagtggatatcccgtcccattttgggcagcgcggtactggcctccatatccacttcgctggcggagatattgggaggagccattgccttgcagatgcttttaggaattcccatagcctggggatctgttcttactacgatgtttgtcgtcattatgcttttttccaattcatataaaaagatagaaagagccatcattgcttttgtatccgtaatcggcctttcgtttctgtatgagttgtttttggtagatattgactggcctgtggcggtccgttcctgggtggttcccgacataccccaaggcagtatgctgattatcatgagtgtgcttggggcagtggttatgccgcataatcttttcttgcattcagaggtgatacagagccacgagtacaacaagcaggacgagagttccattcgtaaagtattgaaatatgagttctatgatactttgttctccatgattgtgggatgggctatcaatagtgccatgatcttactggcagccgctactttcttccgtacccggactccggtggaagagttgcagcaggcgaagtcgttgcttgacccattgctgggcagccatgccggaatcatttttgccctggcattgctgatggcggggatttcctccaccataaccagtggcatggcggcaggttctatctttgcgggtattttcggtgagtcttatcatatcaaggatattcactccaaggtaggtattttgatttctttggggatagcattggttcttattttctttattgagaatcccttttacggacttatcatctctcagatgattctgagtatccagctgcctttcacggtgttcctgcaagtaggactgacctcttccaaacgggtgatgggcaaatatgccaactcccggtggagttcattcgtgctttataccattgcggtgattgtctccgcattgaatatcatgctgttgctcagttgaataatgtgcgaatttgcccatgtgccaattgccatgcgggaccatagcgcagcacgtgggcacatgggcaaattttttatttcgttttgctttccgagataatcagcagtttgtcaccggcatgcagttgcagagagccattggggatcatgaattcgttccccctttttaccagcatcaccagcatacctttaggcagattcatatccatcagcctgtctccctttgccagcatttcctccgtcagtacgatatcgcggaggtctgtattgatttcctccggtatctctactccgaaatcatttcctgttttttccagtggtgtatccagatggagtaatttggccatccatgaaatggtcgttccttgaaccactaaagacaatatggtaatgaaaaatacgatattgaaaatctgggtagatcccggcacatcagccactaccggataagtggcgaatatgataggtactgctccgcgtaatcccacccaggaaataaacagccgtgagctgatgttcatctttttaaagggaagaagacagagcaggacactgagcgggcgggcgagtacaatcatgaaaatgccgatcaaggttgccggtatggcgatggacaacatttcatggggattcaccagcaatcccaggctcaggaacatgataatttggaagagccaggtcatgccgttcataaaagtagcgatctccttacggtttacaatgcgtgcgttacccaccatcattcctgctatatagacagccagatagccgtttcctttacacaggtcggtcatggtgaatgtgaagaaaataaagctcagcagcaagataggatagagcgactggttcttcaagtcaatcttgttgatgattactaccgccagttttcccagcaggaatcctgaggcgccacccacagcaaactgaatcaggaatgaaatcagaatatcgtctgcccccatgcctgccgatgtgatgaattgtatcaggacgatagtaagcatatacgccatagggtcattacttccgctttccagttccagcatcgggcggaggttatgtttcaggttcatgctttgcgagcgcaggatattgaacacggaagcagagtccgtagaggacatggtagccgccagcaacatggccgtcatcagggacatggtaatgctgacattcgagaacccggaaatccaataaataaagaatccggtgaaaatagtagtaagcaacacgccgaaggtggaaagcagtatgccttgtggcaatacaggcttgatatccgaatatttggtatccataccccctgagaacagaatgatgctaagggccatcatgccgatgaactgtgcctcgcccgcatcatggaattggagtcccaggccgtcgcttccgaacagcatgccgaccaataaaaaaacaagtaacgtagggattccgaaccggtagccggtcttgctcactacaatacttacgaacaataggatagaacctatcaagagaatgttttctgcattaaatatcatacttctgtgatcttgtttaattttttaatatgatgtgccagcatcaggcaggctgtgataaatgctaaaagatcagatacaggcatactgagccaaatgccgttcagtccccaccaatgaggcagcaacagcaggcagggcaataaatacaacagttggcgggacaaggagaggaagatagaaattttcgctttcccgatagattggaagaaactggaaatcacaatttgtattcccacgaaaggaaacatcaggactccgatttgcaacccagtgcgtgccaatgctgtaagttctttatcgtctgtaaacatattaacaaccaaattagggaaaagttcgctgaaaacaaatcccagcgaagtgatgcacccccctgcaatcatgcaatatttcaacgtctgcttcacccggccgaatttgtgtgccccatgattatagcccacaatcggttgcatccccatagtcagtcccatgataaccattacaaacaacatcagcagacggtttaatatgccgtatgctccgatagccagatcgcccccgtagagcagcaggctcttgttgaatataatgacaatggccgaagcgcagacattcatcaggaacggcgacatgccgatactgaaaatattttctacgatccgtttccttaatttgaatatccctttcttaaaacggatataacttttttcctgcatgaaatggctcagcacccatatcatgccggcaaactgtgaaaggatggttgccgtggctgctccgcggattccccagccgagccagaatataaagacaggagccaaaatgatgttgcaccccactgtcagcatggaggacagcatcgcttttcggggataaccggtggcacgcatgatattgttcagcccgatcattacataggtgacaggacttcctattaatataatctgcataaagtcgcgggcgtatggcaacgtgtcatggcttgccccgaagaagaacagaatctggtctagaaacagcaaggtgatgcctccgtagaaaatagaatttatcacacagagcaccgttacgtttcccagcaccttctcggcgccgtccgtatccttctgccccaggcggatagaagaaatggtagcgccacccaccccgaccagtgtacagaacgccaccagcaggttcatcagcggaaaagaaatagccaagcccgatatggccatagcgccgacaccatgcccgataaatacactatcaataatattgtacagtgatgtcagtgtcattccgatgatagcagggatagagtactctaaaagcagctttcctaccttttctgtacccagtatgtgcgggttgttttctttcattcgcgtttttattatttttaagctttgcaaagttaggaatatggaggattattcagacctttgcggcgttaaatcaaactaaaagtaatatgaattcaacaaaaagcattgcagctttattcgattttgacggggtggtggtagatacggaacctcagtatagtatattctggaatgaacaaggacggaaataccatcctgagatacccgagttcggccggatgataaaagggcagacattgacacaaatttataacaaatatttcgctggaatggaagacgttcagcgtgaaattacagaagatttgaacaaatttgaagaaaatatgttatttaattatatcccgggcgtagagggctttatgaaggagctgagagccaacggggtaaagatagcgatagtcacaagctcaaatgaaatgaagatgaacaacgcatataaagcacatccggaactgaaacaaagtgtggaccgtatcctcacagccgaaatgttcactcgttccaaaccagaccccgaatgtttcttattaggagccacagtctttgataccgtgcccgagaactgtgtggttttcgaggattcatttcacgggcttgaggcaggaaatcgtgcaggaatgaccgtgataggattggctactaccaaccctgaagagcagatacgcgataaggcaaaggctgttattcaggactttaatggatttagtttcgaaaaaatgaaggatataatgaggtaatgtcaactaaaacatctacctttgcagccgttttttataaattaaagtaaatatggcaggatatatttcaggcgatacacgcaaagtaacgacacaccgtttggtggaaatgaagcagagaggcgagaagatttctatgcttacttcgtatgattacacgacagcgcagattgtagacggcgcaggcatcgacgtcatactggtaggagactccgcttcgaatgtcatggcggggaatgtgaccacacttcccatcacccttgaccagatgatttatcacgggaaatccgtggttcgtggagtgaaacgcgcgctcgttgtggtcgatttgcctttcggtacttaccagacttccgagtacgaagcggtgaccaatgcgatcaaagtgatgaagatcacacatgccgatgcattgaagctggaaggtggcgtagaaatcattgatgcggtaaagaaaatcatcgctgcgggtattcccatcatgggacatttgggactgatgccgcagtctatcaataaatacggaacttatactgtacgtgccaaggacgaggaagaggccgaaaagctgctgagtgacgcgcatctgctggaagaggcgggatgttttgcgttggtgctcgaaaaaatccccgcatcattggcggaacgtgtggccaaggaactgactatccccgttatcggcatcggagccggaggcgctgtggacggacaggtgctggttgtatccgacatgctgggtatgaccaacggtttcagtccccgtttcctccgtcgttatgccgatttgcatactgttatgacaggagccatacagcaatacgtggatgatgtgaaaaaaggtgatttccctaacgaagacgaacaatattaacaaagtttctgctgatatgtatgatgacttcttctttccgtatgagaaagcaaaactgtggaccgggaatatggttctgctatccctttcgaactttttgctttatgcctcgctatacatgatgcttcccgcactgcctttatggatggtgcggcactggtattgcagctatgcggaagcaggagcggctgtggctgttttcggactggccatgtttcttccgggagcgttcaacagctatcttatcgatacgttcaagcgtaaaagtgtttgtctggtcgcgatgcttctgttcgtggcgtccagcctgctgtatccatacgttgcgactgtagggttcatagccttggtccgggctgtccagggggggctgttcagtgtcattaccatgactacgggtagcacgctggtgattgacgtcaccgcctcacgccgccgcacggatgcgaatatcgccttttcgtgggtggggcgttttggaatggtggcaggtcttgcgttgggaatttacatttatccttactggaattttcaccatgttgtttatacctgtgtcgctttgggcacactggctttgcttctgattctggcggtggatgtccctttccgtgctccgctgcgcacctcatggttctcgttggaccgttttctgttgcctcgtactctgtggccggcactgaatatgatgatgctttccgctgttttcggcattttgatagcgcacatttacaatgagttgttttacatttgcatcctgatcggttttatcatctccctgttgcttttgcgttatgtgctttcctatgcttccggccgttcggaggtggagctggggcaggccgcgatgataggcggactgttgttgcttgctttttccaacagcttgatgaacagttatatagccggtgtattgctgggcacggggatcggtactaccgtgtcacggttttttataaagatgattagtctgccgatgcattgcgaacggggtacgggaaacaatacttatcagctgatgtgggaagtaggtatgctgagtggttttctgtttgagaatatgtggaccgaaagtcatcctgatactatttattggatatgtatcggtatctgtgtcactcttttgctgatgtatgagttctttacacatccgtggtattacagaaaaatggaggaaaaacagtaggatgatgatttcaaatgttggtttatccagctgtcggagtaaaaatatagcaacttaaataaattaataatataaagaatatggcagacgacaaaaagattatcttttcgatggtaggcgtaagcaaagccttccaggcgaacaaacaggtattgaaagacatctacctatcctttttttacggtgctaagatcggtatcatcggtctgaacggttcaggtaagtcaacgctgatgaaaatcatcgccggactggaaaaaagttatcagggagaagtggtgttctcgccgggctactctgtaggctatctggcacaggaaccgcatctggataatgaaaagacagtgaaagaggtagtgatggaaggtgtgcagagcattgtggacactttggcggaatacgaagaaataaacaacaagttcgggcttcccgaatactatgaggacccagagaagatggatgcactctttgcccgtcaggctgagttgcaggacatcattgacgctacggacgcatggaatctggacagcaaactggaacgcgccatggatgcgttgcgctgtccgcccgaagaccagccggtgaagaacctctcgggaggtgagcgccgccgtgtggccttgtgccgcctgctgttgcagaagccggatatcctgttgctggacgagcctaccaaccacttggacgcggaaagtatcgactggctggaacagcatttgcagcaatatgaaggtacggtgattgccgtaacccacgaccgttacttcctggaccacgtagccggatggattctggaactggaccgtggcgaaggaattccctggaagggaaattactccagctggctggaacagaagaccaaacgtatggagatggaagagaaagtggcaagcaaacgccgcaagaccttggaacgcgagctagactgggtgcgcatggctcccaaagcccgtcaggcgaaaggaaaggcccgtctgaactcctatgacaagctgctgaacgaggatgtgaaggaaaaggaagagaaactggaaatctttattccgaacggtccccgtctgggcaacaaggtgattgaggccaaaggagtggcgaaagcttacggtgacaagctgttgttcgataacctgaatttcatgctgccccctaacggcattgtcggcgtaatcggtcctaacggcgccggtaagactactttgttccgcttgattatgggactggaaaccgtagataaaggtactttcgaggtaggagagaccgtgaaactggcatacgtagaccagcagcataaggatattgacccggaaaaatccgtttatcaggtaatcagtggtggaaacgagctgatccgtctgggcaacagggatattaacgcgcgtgcttacctcagccgtttcaatttctcgggagccgatcaggagaaactttgcggaatgctttcgggtggtgagcgcaaccgcctgcatctggctatggcactgaaggaagaaggcaacgtgctgctgctggacgagcctaccaatgatattgacgtgaacacgctgcgcgcgctggaggaaggtctggacgattttgcaggttgtgcggtggtgatcagccacgaccgttggttcctggaccgtatctgtacccatatcctggctttcgaaggaaacagcgaggtattcttctttgaaggatcttattcggaatacgaagagaacaagatgaagcgtctgggcaatgaggagccgaaacgggtgcgctaccgcaagctgatggaagactgatgggggcttccctgttctgataaggtccaaactaaaatgaccattccgaaaagtaacagattgtaattacaagacctgaaagagtcgtatcaagctccgttttgagtaatgatacgactcttttttttgcctttaaggaggttcaaatttcaaatcaaaacctctttcttggctagaattaagttttgaaccctcttgggttgtgtactctctctggggcgcggatagcggaagaaaccagaccagtcactgtaaattgtaaccgatttgtagcttgtatatcgtttctattagctatctttgcaacgtcttttaagacattaattataatattaattaattaaaaagtttatggtaaaaagaatgcgatctttttttgcggtggttatgttggtaatcgctgctgctgttaacgcccaggtcaccacttcgtcaatgagtggtaaggtggttgatcaaagcaatgaagccattatcggcgcaacgattcaggctattcacgaaccgtccggcacccattatggggccattaccaatgtggacggccgttattccatccagggcatgcgtgccggcggcccttacaaagtagaagtttcttatgtaggttatcaatcagtggtttacaagagcatcaacctccagttgggagagaattacgtattggatgcgaacttgaaggaatctaccgaattattggatgaagtggtgattaccgcttccaaaagcagcaacatgaaatcagaccgcgccggagcggtaaccaatgtcgatgcggccagaatgtcggaagtgcctacagtgagccgcagcatgaacgatatcatgcgtctgacccctcagggagccaatatcggtagcggtttctcagtgggtggaggtaactaccgccagtcttatgtcactgtggacggagccgctttcaacaatgccttcggtatcggctcgaacttgccggcaggcggttcgcctatctctctggatgctttggaacagatttccgtttccaccaccccctttgatgtccgtcagagcggatttacaggaggtgccatcaacgccgtgacaaagagtggtacgaatgagttcaaaggtacagcctatatgtacacttccaatacccacctcaccggaaacaaggtagaggactatgaactgacccgcaaccgtgaccacagcaccacctacggagcttctctgggaggtgcgatcattaaaaacaagttgttcttcttcgtgaacggcgaatatcaggataatgtgcaggcaggcccgtcgggcatagcgcgtagcggcgccaatgacgaatggagcaccaacggcattgtgcaccgtccgttcgagaacaccacaacggtaggcgaccgtaccttcgtagggatgaacaacatcagccaatacctgtcggaaaaatacaactacaatccgggacgttatcagggatattctctggaaaccccttcttacaagatcatgggccgtctggactggaacatcaacaacaacaacaagattaatttccgtttcacccatacccattccaagtattcctccagcccttcctcttccaccaccccgtttaaggattcagtcatctatccgggcggagtagacggcagcgcgggcaagagcagttcgggacgtacatcaaacaccggtctgtactttgaaagctcacgctatatgcaggaacagaacttcacctccatcgcttccgaatggaactcaaagtggggggctatcaataacgccctgcgtttcacttattcttatcagaacgaaccgcgtacatacgaagggggaacattccctacggtggacatccttgaccaaggctcgctgtacacctcattcggtccggacccctttacagaagggaacttgcgccaggtgaagacttttgtcattaccgatgagttcaatttctccagcggtatccataactttatgggcggtatccagtttgagtccaataaggcagtgaacggattcatgcaggcgggaagcggttattatgtctattcctcctgggatgattttgtgaacaacagagctccggctgccttcggtatcacgtattccaacaccggggacggttcccagttcctggcgaacatgaagtaccagcagctttctttctatctgcaggaccagatgaatatcacggacaacttcagactgactgccggggtgcgtttcgaactgcccatttatccggagctgaagaacaactataacaaaaatttcgcacagattgactttgacggatatcattacgccacagaccagctgccttcatcctaccagctgaccgcctccccccgtatcggtttcaactgggaccttacaggcgagcgtaagtatgtattgcgcggcggtagcggttacttcatcggccgtctgccgttcgtatggctggtttcggcagtaggtaatgccaattgcggacaaagcacttattattataacgagcagaaggatgccaagtacggacagccgggcttccacaccagcgtggccgatatgttgaaagatcctaacctgaaccttccggcagctactgatcccgccgcaccttccggagccaccatcattgaccgcgacctgaagatgaacgccacctggaagtcttcactggctttggatgcaaaacttcccggagatattgactttacgttggaaggtattttcagcaaagagttcaatccggctactgtgaccaacctgggacgtaagtttaaaggagagcaggagatagctccgggtgatgtccgcagaatgtttgagtactccaattcgaacaagacggatgcttattatatcaccaatgcgggaaacagcgcttattattactcactcaccgcctcactggccaagacatttgatttcggcctgcatctttccgcttcctacacccgttcttatgccaagtcgtatggcgacggcatcggcgaccaggtgaactcggcttattacaacaaccgttactctgtcaacggaaacaatgacacggagaccggctatggtacgtatgtatcgcccaaccgtgtgctggcttccgcggcttaccgtattaaatacgccaagaatttcgcttcctccttgtctttgatttatgagggtatgaacatgggctatgccggaggatattccgccgcccgttattcctatacattcaccggaaacattgtaggcgattacggctcaaacaacttgctgtacattccggcatcccgtgaggcgctggataagtggaacttcgccgattatactgacagcaagacgggtgaggtgacttattccgccaaggagcagcgcgatgatttctgggcttacattaatgaggacagttacctgaaaggccgtaaaggcaagtatgccgaacgcggaggagccatcatgccctggcatcatcagctggatttgaagttcaatcaggatttcttcctcaatgtagggggcaagcgcaataccttgcagttcggagtggatatcaagaacttcctgaacttgctgaacagcgactggggaatttataagacagtgaacaatacttccttgttgagttataagagtggtgcttaccagttccagaagaacggaggaaagaaactgactgatacgtattccaatctgaacagtttcaattctacgtattccatacagttcagtgtccgttatatctttaactaagtaaaatagcctgtatcagacaatacaggaacaggatagagaggcgtacccatgaaggtgcgcctctcttgtatgcgtattcttccttgttttgaaaaaacttggaattaagaataaattaagtacctttgtgtgttatcctataaagaacaatagtttatgagtgataagatatatcccatcggtatccagaatttcgagaaactccgcaaggaaggctatttctatattgacaagacggccttgatctacaaaatggtaaagaccggcagttattacttcctcagtcgtccgcgccgtttcgggaaaagtctgctggtttctactctggaagcctatttccaaggcaagagagaattgtttgaaggactggccatagccggactggagaaagactggacagtacgtcccgtcctgcatatcgatctgaatatctcaaaatatgagacagcggaggatttgagcgatatgctgaatgattttctgaccaactgggaagctgtctacggttccgctccttccgagacatccctcgccctccgtttcaaaggcgtgataaaacgtgcttacgagcagacggggcagagggttgccattctggtagacgaatatgacaagcccatgctgcaagccatcggcaatgaggagcttcagagagtatatcggagcatactgaaacccttctatggagtgttgaagacaatggacggttgcatcaagttcgctttgctgacgggggttaccaagtttggcaaggtcagtgtgttcagcgatttgaataacttggacgatatctccatgtggaatgagtttattgatatctgtggggtcagtgacaaggaaattcaaacctggctggagccggaacttcatgaatttgctgaaaaatgggggaggacatacgatgaaatctgcgccgaactgaaagagtgttatgacggttatcattttacacataattccatcggtatttacaatcctttcagcctgcttaatgccttcaaacggaaggagttcggaaactactggtttgagaccggtacgccgacttatctggtgaggttgctgcaaaaacatcattatgacttggaacggatggcgcacgaggaaacggatatccaggtgctgaatagtattgattccgagtccacgaatcctattccggtgatttatcagagcgggtatcttacgatcaaggggtacgatgagcgtttcggtatctattatctaggctttcctaaccgggaggtagaggaaggattcatgcgttttttgctgccttattatacaacggttaccaaagtggagtctcctttcgaaatcctgaaatttacccgtgaagtggaaagtggtgactatgattcctttttccgccgccttcagagcttctttgctgatacgccctacgagatgatacgcgacttggagttacactatcagaatgtacttttcattgtgttcaagttggtaggattttatgtaaaggtggaatatcataccagtgaggggcgcgtggatttggttctgcagacagacagatttatttacgtaatggaattcaagttaaacggtacagcggaggaagccttgcgacagatcaatgaaaaacagtatgcccgagctttcgatacggacgggcgcaaattgtttaaggtaggggtgaacttcagcaagaaaagtcgtaatatagagaaatggatagtgggttaactattgaagatattaaggacatacgtcaatgccacgcaaaatgctcgtaaacaagagcattttgcgtggcattgcgttccggatatacactgaccactaaaagcctctccaccgttcccttctgatctcctcgcactgccgtcgctgccatgcaggcattattttctccagtgctttcagtttccatcccttcataaagcgtatctcgtccttttcctgctccgtgcacaggctgatgcgcagcagttcggggtagagcacctgtatatggaaaatcttggctctccacagcagcatggacatctgccagggggtgagggcttggatgcggttcagggtgagcagcatttccagataatgacggtagaaagctttgtccacggtcatgagttggtttatcagatggttcatttttattattgttaaatgaaaagattagttgaatggagaagcaggaaatcaaagtggaggaaaggaacactatctttggtaaaatcatccttggatacagtatctttgaagaaacctctttgaaaacaaacagttctctttagaaatcctatctttggagaaaagcacccttaaaagcggtattccttcacagcatcaaaacaagggcacggcttcacgggattcaggtcatgatgccccactatcaatgctttggggaacaggaggcgcagctcgcgcagcaatgccagcagactccctttctgcatcagagtacgcgtatcggcaggtgtgcagtccgccgagagtccgccctcatagcagatgccgatagaatgccggttgtggttcctgcaatgcgctcccaccttttccaaggggcgtccgcggtgaatctctccgtcgcgggtgatatagaaatgatatcctatgtccgtgaagccccggtggcggatgtggtcccggcggcaggtctcaaaatccagcctccgcccctcaggggtggcggagcagtggataataatcaaggtgatggttctcatgatcatcagatgcaggcgttcagtccgagcgcgccggcaagggcggtggctacggtgatgattactttcagaatcagtgtccaggtgtttttctttgttttcaagttcatgggatttttgttttagtgggttgataataaatgaattaaaatggaaaccaagggcctgtgccccaatgaaaacggcttgtcattagggcacattcagccttttagcgtagtgccttgtttccgtcgtactggtggggttccgtcaggcctgttgtcctccgttttccggctctttcgcctctccggtaaggtccacattggtctttccggctttcagcgccttcaccaccagtcgggccgccttgcgtgtggccaccagattgaacacggcatcttccagcagattccggaaacgtgttccggcactccagttcacattcagctttctggcgtggatggcagggttgtaggcggctgagctttcggcacctatactgttgatgctgatggagaaatcccccaagtcgcccagctgtatcttctgtcctgccagaagctgttcgcgcatgcagtccactgccatggtgaggatggccacgatgtccgcacgcttgtacacacagccgtggctggcgatgtgctcggcaaagcggttgatgtccatcacttcagcatactgtgcactggcgtaagccttttttgcggcatccgcatccatcggattgttacgcataacgatactgtaatttaccatagtttgttaaaattaaaagttgaaaattaagaattaaaaaaacacgattgccggaggatgaagtcagtcactggtcaccgaccgctaaaagaaccctatcttttacgtgtaagatgctatatcttacagctgtaagattatagatctttcgccttcatcgtcccgacattacaaagatacgatgtgcggaaagggcaatgacgcgataaggtgcgatagggtgcggaatggtccgatttgacgcgatttgacgcgattcgctgttcataatgtttgacggtctgccggaaaaagggtatatttgtatcaaaacaaaacgaacatacatggagaattttcagataagaagttacgggaaaagcgaactggccctgtgctacagtcccgatattaccgagagtgccgcacggcgcaaactgatgcgctggatagaccgcaagccgggactgatgggggcgatgcgggctgccggatacaatgagctgtcacacactttcctgccccttgaggtgaaacttatcgtagaggcgttgggggagccctgaggatgctggaagatccacgggaatgccggggattctccgggagcacagggagatccacgggaataccggcatcacaaccggagatgcgaaacgcagacgtagacgcagcagacgcaggtccttttttctcacacacgcgcacgtaccttatatatgcatgtgcgcgtgttttctttgttacctttgtttttttgagtagactcctttccctttcaccatcaccatatccagcgcgcctttttccctcaggcgctgcatccagctgcgtgcggtgttgaccgggatattcagcttctccgcttgctccatcaccatctgtttggtgaattcttgcggcagggccgcatacagcatctcacggtccgctattccccggctgttcagttccgtacttttgtccaggaacgaaagtatgtgcgtggcatgaaggtacaggggctcgcacaaagccagcacggcgcggaagtcctcatcggtgatggacaggttatgccgggtgatgataccgtccttcaggttttcggggtttatagtgggatccggtacggccagcgagggaatttccagactgcgcagcagcgccgtgatacacatcatgcggcacaggatggtccccatacgcatcaccgaagcagacatctcttcgcccgtcactagagaagagcggtagaacagggcgctgaagtgcccgttgaactcatctttctgctgctgggtgaatttcagggtgaacagtcctttcttcttcagctcgtccctgctggccttccattcgtgtcccatccggatgaactctgcttccacgtccagttcatcttcgccgaactggtctttccattcgcctacacggggcatgtaatagaatatgtttcgcgagaactgtccgttctccggcgaggagatgagcggctttatctgtgcgggcgtgcccgagaggagtacggacaggtaacaggcggtggtttccttgtattcccggtctgtacggcggttgtaggacaggcggtcgtggtcgaacgccttgcgcagcgtgtcgctccagttgccgaattccgtccctatggctgtcgatacggtgtccgcctcgctctcgcagataatccccgttccgtccgagtctatcaagttttgcagcagtcccgtgcccgtgttgttaccggggatgatgaacatgcggttgggcggcgccacgggcggctccttgtccttgcgtgccttccccagcgtttcgtaggctcttagctccttgcggtaagctttcatgctctccgccacctgccggcgtatttcctcgtgtatgggctctatgagtttgcgtacccataccagtacactcttccctgcggcggcatggcccgtgatgaaggtctgcaggcagggatactgccatttgtccccgtacttgcagcgtacgatgtgcgacagtgaggcgcccagcaccgtcattgctcccagcaggagcacatcatgctgtgccggggtcttggcaaaggagaggatgctcttcagcggttcgggccagtcgtgatcttgcggaaagtagggtaggggagagaggggttccgttcccttcatttccttttcctcttcctcgtgcttcttttttcctgtttctttttcttcattctccaccttattatatcgcgcgcacgtgtgtgagaaaaaaggacctgcgtctgctgcgtctgcgtttttgtgagagggggcgactctcactccgcacatttccgccaggtggaacacgcttcccaggtggatgtcgcccttgcaggtgtgcagggcgttgctgaacagtttctccgccgccgcactgtcatgcttgggcgagaggctgcacaggctcatgaaatccgcacggcccgcctcgccgcagtccgtggcgatggcgaatgccagttgggtgtattccagataggtgggcgcgatgtccgcgtgtgatgcctgtaccgcctccgtcaggcggtgcagttcttccaaaagattgtttttgtaatgattcatattcctttttatgttaattgggtttcggtataagaatacctcgtttctgaatgattctgaataagcggcccgttggcccgtgtgctgctatgcccgttggccgcgttctgttccgcatggggattggcacattagcccatgggcgtcttgactctcatcaaggccctttcgtcatgcgacaggaagcaggcccgcaccaggtctttgcccgagtagtccactcctttgcccttgtctttgtccgagcagtcgccatacctcaggcgggcgtattccatcagccagtagatgttctcggccgcattctgtttcacgtcgcttgtccggccgagatcgtagggcacgaaagccttcacgccgtgtcctccggggcttacgaacaccagttcgggcagcaggaaagggtcgtcgaacaactgccggcgcatcctttcggcctcctcgcggctgtccagatggtccaggtccagtatgctcaatcccgaaggagccagcagccggtcgctccggcggtagctgaaagttccgcagggggtgacgtatggcagggtgctctgtttcagcctgcggtactccttctcgtcaccgtatgcggcggctgcggcttcggtcagtttcttcagccgcgggctgccggtgactatgttccatacttcctccaaggtcagttccttgtgagggacgagcgtggcaggcgtcacgtttttcccgttagcgtccttcaccggcgagatggggggaaggaaaaaagatagtttacgttcttgattcatgattcgttttatttaaaaagtattaattttgcatccgcattttttttgcgtcctctgaatttcttcccgaaggtaggaagaacggattaaatgacgggatggaaggtgtaacggctgcgagaggccggaaaggtagtatgacaaaagactttttatcgtggggaataccgtttttataaagattccggcattggcaatcagtagcttatgcacgggccgtgttaatgggttgcatcgtggaaacgtgcccgtaacctcttgtaaaggcatcctgctttttcttctttcagtcccattgtgaagtaacgtgaaaaaaaagaggtttatttaatattttacaacttaaaacaaatttaaaatgtctaatgcagagtgcagtttccccaaattgggagagtttttagagttattgatgaatcggttgaagataacgaaggtgcgtgttctcggagatgagcatgtggggccggatacttacgcctccctaaaaagggggtggatttgaaagtgagttattatattcattttgccgaccatctgctgaaagcgaagggcgaggaggtgttccgccgcgtagtgcaggagggagtggatgcctatatcaataactggaagcggaaagaggcagccgaggaaaaggcgtacgagctgaagaaacaggccgaaaagctggaggcgctgagggagaggatgaagcagcataaggatatcctgtaaggctggttgtccgttttctttttgctctgtcattggggaagtgagagagtctgaatgaaaatgacctgttgtcttgctgtagggggcgggcctgatttgtccggaccggccggtcacggcccatttgccccctacagtaatcatgtggtagttgctctggaatttccgggcagttttcccctctcctgaggcggctctttgttcctttcttaacataattgtcatattccgcctaaaaagtacccttttcgtttaaatagtctaatataaatgcaatttatatgaattaaagttttatctttgtctttcctattgggaatgaaatactaactaattaatttaaatcaaagacaaaattatgagaaatcatctaaagcatttcctcctgttggcagttctgacaatctgtttcactgctacggctgttgcgcaaggaacagtaaaaggtaaagtagtagatgccgagaacaatgagccattgattggtgccactgtatcggtcagcggtacgacactgggtactgtaacggatattgacggtaactttgtgttgaaacttacctcttccagggctactcttatattcaagtacttggggtacaacgaaattacgcatcaagtaaaaggaagccatacgatagacttgggtgaggtcaagatgtctcctgatgctattggtttgggtgaggtcagtgttattgcctctattataaagagtgaccgtcagacccctattcctatttctaacgtgaaactggccaagatagaggagaaaataggtaatctggaattccccgaattgctgaaatcagttccttcggtgtatgtaacccgtgaaagcggtggttatggtgattcccgtatcaatatgcgtggttttgattcatccaacctgggcgtgctgatcaatggtgtgcccatcaacggcatggaaaacggtaaggtttattggtctaactggtccggtttgtctgatgtgagccagtttatccaggtacagcgtggtttgggtgcgtcagctttaggtatttcttctgtgggaggaaccatgaatatggttactaaaagtaccgaagcccagaaaggcggatcagcttatttcggtatcggtaacgacggtttccgcaagtattcggtttctttctctaccggattgatggacaacggatgggctattacattcatggggtcgctgaatacgggagatggttacgtgaaaggtaccaattatgaaggatggacttattttggaaatatctcgaaggtaatcaacgatcatcataaattgtcattgacagctttcggagctccccagtggcacaaccagcgctctaccatgcactatatcgaggattacaagaacagccccgacggcggacgtttcaataacggatacggttatatcaacggtgaagcggtaggtagcggttacggctataattattatcataagccccaggtttctttgaatcattactggactatcgacgagaaatcgacactgaccacttctctatacggctcaatggctacaggcggcggacgccgtgcccgtggcgcgatgagcaattggctgactattgataacaacaccggccgccctaaagacggtgcgatgatgactccggacggtttgttcgactacgagcgtgctatggctgccaatgcggcttctcagaacgggtcgcaggtgatctttaccaatgctgtcaatgaccatgactggtatggcatgctgagttcctataagaatcatctgactgagaacctgactcttacgggaggtattgacttacgttactataaagggtatcatacagaggaaattgatgatttgctgggtggtgagttctatctgcagacctcgccgctggcattccaaaccaagaaccagctgctgaaagtgggtgacaagttcaattactatagcattggagagatattctggggcggtgtttttgcacaggctgaatataataccgataagtggtcgggattcctgtcggcatcattgaccgaagaggcttatagatacgatgaccgtggtggtacggattcaagatactctgccacgggtgcggataaactggacagagtgtccagccttcagaattttctgccttggagcgtgaagggtggttttaactataagttcaatgacaaccacaatgtatttgtcaatgcaggatattttacccgcgcgcctttcttcaactctgtctttgcaagcaatacggcagctcccgaaaaggatgtaccctacgaaaagattactacgttcgaattgggttatggatttagcacggaacaggtcaatattgcattgaatggttattacactcaatggatggataagtccttgcgccgtaagatcggtcaggaatatgccaaccttacaggattggacgcagtccacatgggtgtggaactggaagcgacttaccgtcctgtcaagtcctttgaattgaaaggtatgttctctttaggcgattggaaatggaaagatgatattcatttcactatgtatgatgaagcgaataatcctatcggaacatacgacgcttatctgaaagatgtccatgtgggtaactccgcacagctcacttccgcattgagcgcctcttgggaaccgttcaaaggatttaaaatctcggccgactacaacttcttcggcaagaactatgcagacttcgatcctcagaaccgggtgaatgaagcagacgccggtattgactcctggaagttgccggattatggtacgattgatttgggtatgaactatcgtttcaatatcaccaaagatatccgtgccatcgtatacagtaatgtatataatttgactaatacggaatatatagccgatgccaaggacggtacgaaccatgactggaaaactgcattggtatattacggcttcggtactacatggtctgccggttttaaagtaatcttttaatctctaaaatagtcaataaatatgaagttaaaatataatttaattgcatggtctctgttgggattctttgctgcggcatgtgatcccatggacgatatttataatgaaatcgatgcggaaggtacaacgaacacccagacgatggcggaatatgtactgactgatgccgattacgaaacgatcagctctgcggcggcgaaggctgccacttcggatgctgaaaaagcattggcgaatgccgtcaagacggataaggctttgaacgagtttgcatcggccgagaagtatgttccttccatcatcgcgaagatgttgccttcatgggggaaaggctcttcggtaggagtgacctataactatcagaatactccttccgattacgtactggagtataggacagtaactaatacttctttgggtgataaggattatgaggccctgtggggcgaaggctctcccgtgaagttcctggctccggcacatgctccggctaccgtattgcccgagtggctggccggtcagtataaggatgcggcaaaaggtgatcttgtgctggtagattacaaatatgacgatgttgatcctgaatttacaggggaggacttgtactctcaggactttgagtcggttacggccaatgaggatatcgtgttggaaggctgggagcaggtgactctggaaggcgatagaaaatggcagggaaaaaactatagtagtaatggttacgcacaattctcggccaatggctttgagggtgaggtggatacttggcttgtttctccggcagtagcagtgacgagcaaagatgccggactgtctttcgacataaagttcggatactataatgcggattgtctggatgtattggtttccgatacatatgcgggaaatggttcgattgatatggcacagtggactagcgtgaaagaccagtttactttccctgaaggacctgccaacggttacaatgataattttgtgaatgtagggaaagccggtctggaggcatacaatggcaaaagcgtttatgttgcgttccgctatgtaggcgaggggcccaaggcgaaaaccacgactgttcagctcgataatgtaagtatttcatcggctgtattggctccgacgaatgaaaagccttataatgcattgtatcagtttgacggaacggattggaaggttaaagaagatagcagattggttgtagtgactcctgccgattatgacgctatgggaagcccgggcagtcatgataacttcagcacttcggatgctccggagaattatctgccccagttcctggctcagaaatttccatatgcccaggaaggggattcaaaagccgtcatgtacaaatattataataaggtaacgacgatggaggtggacgagtatttgttcaaggagggtacatgggttctgaataacaatattgaactgaaagaaaaagtgaattttgtacataatggaaccgagtggttgtttgatccgacggtaacgaaatcattggcttccgaagattatttgattttggaaaattgggtgaaagcgaataaggatgccgggtatatggatgccaaatatggaaactcggaatactggttcggtggcagctcttattatgtaaacttcaatatccagttggctaaacgccgttcgaatgaccccgacggggtggttccggcagatgataaagaggctgaggcttatttgttgtctatggttcaggagggtattgaactgatcttggcaacagagtatcctacagccggcgcgcaagtaagtggggttgattgtttctatgtcatttctgcaaaagtgtataatgggcttgaaacatttacttatacttatactttcaaaggtttaggaaatgctaaatttgaactgcaaggtgaacctgaagtaacaaaataaggttttaaacttgaagataaataaagtgggtgtcaaaaactcagtttttgaaaatatgaacttataatctgaaatttgagcatcctaaaagactaaagaaagggtcgtatcattactccatacagggtttgatacgacccttttaagtgttatagttactatctgtaacttttcggagcagtcattctagtttttggacacgtttctttattgttgcttacagtttataagtagagaatgtgaactcattttggggggtagaaaagtaatgatcttaaatctgttgaatgatatttctttgaatatttacagactgtaagttaaaaacataaggagttgaccggcggaacagccctttttcttttttattacgaaactctttatacagttatttccgtctttgtataaacgctttccccctatagaggtgagtgacatattggaacattaacaatttattagcagataactttcttgaaatccgcttttttttcgttcctttgtattgaactgctttcaacagagttaaaacaactttaaatatcaaacgcttatgtgtagtgaaggattgcgtgaaagatatgtaaatccctatacggactttgcattcaaattattgtttggaaccgacttgaacaaagaaattcttattggcttcctgaatgccttgttcgacggcaagcaggtcattgaggatgtcacctacttgaacacagagcatctgggcagcaaagagactgaccgccgggctgtctttgatgtctattgtgaaaatgaaaaaggagaaaagattctgatagaaatgcagagaggggagcaacagtttttcaaggaccggagtatttactatgctacctatcctatcagggaacaggctattaaaggggaaatctgggactatgaactgaaagcggtgtatgtgatcggtattttgaattttgccttggatgatgtttcgtcttccagcttccgccatgaagtgaagctgatggatacaactactcatgaagtgttttttgacaaactgacttttgtgtatctggaaatgcccaaattccataaaaccgagcaggagttggatacgttgtttgataaatggatgtttgtgctcaagaatctggcccgtttgatggaacgccccactgcccttcaggaacgtgtgttcaaccggctgtttgaggctgccgaaattgctcagttctcaaaagagaacctttatgcctatgaggagagtttgaaagtatatagagattggaacaatgtgattgatacagctattcagaaaggcattgcgagagggatggaggaaggcattgcgaaaggtgaatggatgaaagcccaaactattgcaggaaatttaaagaatgccgggctttccatagctgaaatcgcaaaagttaccggactttcggaagatgagataaactccctttgattcttcggataagagcataaaaaaactcctctgatataatcagaggagctgttctttttgaagtaaaatgagttatgcttcagcaggagcttcagtagtttcagcagcaggtgcttcttcagcaggagcgttagcggcttctgcttcagccttggcagcagcttcagcagctttcttttcagctactttcttggcaatttcttcatttactttcttttcagcttccaaacgagctttttcttcagctttctttgcttcgtccagtttagccttcaaagtagccagaccggattgtttgttgtttttccaagcttcgaatttagcttcagcttctgcttctgtgaatgcgcctttggcaacaccccccagcaagtgctttttcatgtaaacaccttcttttgacaggatgttacgtactgtatcagtaggctgtgcaccgcacattacccaatgaagtgcgcgttcaaaattcaaatctactgtggcaggattggtattagggttataagtaccaattttttcagtaaatttaccatcacgtggagctcttacgtctgcgataacgattgaataaaacgcatagcttttgcgtccgtttctttgcaatctgattttagttgccatttctaaataatatttttataattaatgatttgaattaatgctaataacccgtattagcgggtgcaaaggtaagacttttcttttgaaccgcaaagatttggatgagataaaatataatttttataaaaaggtggacagacatagtgttaatcgctagaaaaattatatatttgcaacagttacaatttaactaaaaataaaagaattatgatttcacaaaaattacaagacgcaattaatgctcagattgtagccgaaatgtggtcggccaatctttatctttccatgtcttattttttcgctgcgaaaggctatgaaggttttgcttcatggatgaaagcgcaggctcatgaggagaatgatcacgctgatatgttggcgcaatatgtgatgaaacgtggcggacaagccaaggtgggggctgtggatgctgttcctcaggaatgggcctctccgctggatgtgttcgagcatgtatacaagcatgaatgccatgtttccgaattgattgacaaactggtagatgttgcttctgctgaaaaggacaaggcttctcaggatttcttgtggggatttgtacgcgagcaggtggaagaggaagctaccgttcaaggtattttggacaagatcaagctgggtggtgatgtggctttgtatcacttggatattcagcttggcgcaagaaaataagcgataagagaaacgaatgcctgtttttttgtcttttgcagataaagatgcaggtgtttattggaaatagaaagtgggtgtgtcccaattcagtttttggaaatatgaacttataatctgaaaattgagcatcctaaaagactaaagaaagggtcgtatcattactccatacagagcttgatacgacccttttaagtgttataattactatctgtaacttttaggagcagtcatttttgttttgacacgcctccttgcttttttacagtatttctctcagccatttttctaattctcccgtccattggcgcttataggtaaagctgtcgcggaagccccagccgtggctgccgataggataggtgtggagggaagcagggactttattctttaccagcgccaggtaatagctcacgctgttgctgacgggtacagctccgtcatcgctgctatgcatgatgaaggcgggaggagtgtcgcctgttacttgcagttcattggagtaaagtctcactagctcttctgacgggctttttcctaaaagattgtcacgtgagcccttatggcagttggacagatccatgcttatgacgggataaaacaggatctgaaaatccggacgcgttccggctgtatagtgggtggctgccgtactggccagatgtccgcctgcagaggcccccatgatacccactttttgaatatgccattcgttggcgtgttctctcatcagccggatagcctgatgggcgtcgctcaacggtacatcatggtgtccgtttggcatacggtatttcaatacggcgtatgtgatgccttgtgcgttgaaccagtctgccatatcgtgcccttcgtgattcattgccaggcgtatgtatccccctccgggacaagccacgacggccagtccgttcggtttggctgccggataaacggtaagggtaggctcgctgacattggaaatccggttgttctctaatttctgctcgggggtggtgatgccgttggagttgggggcgccatcgggccataattccaactctacaggtttctgggcagacaatgcggtagagattgcaagtaaactcattagtaagattcgtttcatatagcttttattttcacggtatttgaaaaagggttattttttcttgatatgcatactggctttaaccagccatatgatcaggaggatataggcgactattgacagcacttcgctcaacgggttgctcagccattcttcattgaccagattgataccgccaaagcgcatggcggcactgacaacccccatcaatgcgcctccggctatgaatccggatgccagcaaagttcccttctcgccacgttcggcgttcaccgcctcgtctttgctgcgggtagtgacataccagttcaccgctccgcctaccagcaacggcaggttcaattccagtggaatgaacatacccagcgcaaaagccagtgcgggtactttgaagtaggtcagcaccaatgccagtacggcgcctattccgtaaagcagccagggagcgcctacaccgttcatcaacgggtctattacggctgccatcgcgttggcctgcggagctgccaatgcgccggtggagaagccgtaggtcttgttcaggatcatgatgacgccgcccacagttgctgccgataccagtgtgccgaggaatttccatgtttcctgtttggcaggagtactgcccagccagtaacctattttcaagtctgtgatgaacccgcctgccatagagagtgccgtacaaaccacaccacccataaccagtgcggcaaccatgccggtagcgccttttagtccaacggcaaccattactaccgaggcaagtatcagtgtcatcagtgtcattcccgatactgggttagtgccgactatggcgatagcgttggcggctacggtggtgaacaggaatgcaatgccggctacgagcaggatggctacaatgctgtgtaatacatttccatgcatcacatcaaaaaagaagaacagtaagatcagcaggatggtgaagatggaaccgaaggcgatcactttcatggaaaggtctttttgcgtgcggatgacgtttgcttccaccttcttgccgcccatctctttggcggccagtcccacagcactctttataatgccccatgagcgcacgataccgatcacaccggccatggcgataccaccgataccgatacttttggcatattctttgaatataagttcgggtgacatttcgctaatggtttgtgtcaaggccggattccatgcattcagcacttgatcgccgaacaacagggccatacccggaacaataaccagccataccactaatgaaccggcacaaatgatagccgcgtatttcaagccgacaatatagcctaagcctaatactgccgcaccggtgtttattttcatcaccagtttggctttttcggcaaccatctcaccccagccgcatacgcgggtggtgaagttttcattccaccagccgaatgtggctacaatgaaatcatacagacctcctattagccctgcaaaaagcaatggctttgcctggcttccgcctttctcgccggaaacaagcacttgcgtactggcagtggcttcggggaagggatattcgccatgtttgtcgctgacgaaatatttacggaaggggatgaggaacaggattcccagaatacctcccagcagtgagctgacaaacatctgaaagaagttgactgtcatttcggggtatttgtcctgcaatatataaagggcgggcaatgtgaagatggctcctgccactatgactcccgaacaggcaccgatggattggatgatgacattctcacctaacgcgtttttacgcttggcggctcccgatacacctacggcgatgatggcgatagggatggcggcttcaaaaacctgtcccacttttaatcccaggtaagctgcggccgccgagaataataccgccatggcgataccccatagcacagaccataggtttacttcgggatattttttgtttggtgacatgatggggtgatattgttcccccggtttcagaggtcggaacgcgttatcgggcaatccaaccgatttttcttcttcttgtttcatgtttctctatgttattatttttgaaatttatcataataaatgcccaaaaatagtgaaaaaatagagaaacatcctcatgatttgattagaatatctgaaatttcaatccaaatgatagtctcagatagtcatcgggtttcaaataactgttgttgaacgcactgacaacgtataaatcgcatgtgctgatttcgtagaatgcggtgatacttttagagaacttccggtacttttcgggcacgtcgaaacggacgcgttgtcccagaaagatatgggtgcggatacgggtggaaaatccgtagtatccacggggatagcgctcgggttcgcttgtccagaaatcatcgctgaatacggtgttgaaatagattccggtagtcagcggttccagcgagaagtctttgcccagccagatactccacgggatataattttgtttcaaggtcatggtcatcttgaaatgtttggatgagtagcgggggatgaagcccaaaagaagatcggtttcccattggcctctttttccataatcccagcctatgccccaggataacaggcccattccaccggcgtactgtaatttggtgtgggtggggatcaaagcttcccacgcacgcctataacggtgtacgcgcttgtcgtatttatggtgccggtttggcatttgggttacaatatcttcctcttggttttgaacggaaggagaggggacaagtatgctgtctttggataagatggagtaaagtgtattattttcttgggcttgtgccgtaaaaggcaatagtgaccacaataggttcagaaatatctttttaaaattcaactgtttcataatcgtaggttccatcttctttaatggtgaataataagtagatgcgtttatctatgcaggggcattggaaatacagaactccgtcgttgaatagatcatctactgcgaatttgtgttcatggccgtaaagacagaactggactttggggaactggttgacgtatagttggaagatttttgctacattgttgttgaatacaaattcaaaaggttttacgtgcattgcgaataccgttttttctatttcaggcgacaggttgttcagttcattttctataaagttgaaatcgggaaccggttccgaataatcatattccatcgcattggtattgaggcagataaagcgtacatttccggctgtgaaggcgaagttgggatctccataaatggccctgtatgcgtcttcacctgtacccagacagtcgtgattgcctaaaaggcatacgtagggcatctggaatttgttaaatatgtcccgcatccatatgaattcttttgtgacaccgaagtcggactggtctcctccgtgaatgacaaagtctatgtcaccacgggcattgagggcttttacaacatcctcggtagagttgtaccatcgttgggtatcactgatcatggcaaagcggattgtttttttgccttgcattttgttttctatcaactggatgtttttgttgttcagttctctttctcctgtaatatgtacatcgtatggatgggtttccagcatgtcacagccactgaaacagagggccagtaggacaaagaataatagcttgtttgtcattgttctcttaaatttgctgcaaagtacgttattttaatcagaataagagtggcttattattggggaaaaatgttctttttttcttatttttttgtttttacttgcatacaggcaggcggggcagtgttttccggatataaaaagaggatgtatcaaactcgaatcttcttttgttttgatacatcctctctcttatgatgtgagaattctattcggcagctgtgtctttcggggtcatgtcaccttctatataaagacgtgtcatctcatttttcccgtttgtgcggatagtgattgatttcttgaaatgtcccggaaatttgccggctccattataagtcactgttatctgtccgctttcacccggtttgatgggctctttaggatattggggaacagtacatccgcaagatgcgatcgcttgatggatgactaggggaccatctcccgaatttttgaatttgaaaacacaggtaactttcgggcttgactcgggaaatgaaccgaaattatgtgttgttttctcaaaggttatttctgcttctccttgagattgccatacggctgcgtatgtggttaaccctataatcaacaataatgttgaaagcaaaattttcttcattagttccactgtttaaaaattatcggggctaaattactgttttttttataaaaggtctttaactgttagtgaaataaatggtaaattaacacctttaaaaataagggacaaagattatcaaccctataatggcggcaaatatggcgcaaatcagtacggctcctgctgctatgtcctttacgtctccggccacaggatggtagtccggggataccaggtttaccaggcgttctatggctgtgttgaatgcttcggcagccagtaccattgcaaagcacaggaggatgacaagccattcggtgcgtgttatttccaaccggatgcctgcaatggttacggcgatgatggctgtgcaatgtatccaggcattgtgttccttacttaaaaaactacatacgcctttccaggcgtatgtaaagctttttagtcgtttatgcagttcattcattttttttaagcttgggatgggtttatcctctgtttacctgttttactccttttactgtctttatcttttttactaatgattccagctttgaagtgtcatctaccattacggtcatcatgccgctgaacagcccgtcgtgcgagtcgatgctgatggaacggagcaggatatcgttttccttattgataatggaggtgatatttgtcacaattcctatatcatcatgaccgacgatgcgcagcgtgatggggtattgtttgccgtggctttttccagcccaacgcgcctttacgatacggtaggcaaaacgtgattgcaattctcgtgcgttagggcagtcggtacggtgtattttgattcctccgctgatggttacaaacccgaatacatcatcgccatagatagggttacagcatttggctaatttgaagtccagtcctttcaaattctgatcaatgaccagcacatcctctttgaaggtcttgtcatcctgtgctgtctgcatgctgaaattctcggcgctgcgatagacaatatcttcccggttttccgtttcctttttcttcagttccaggtatttttcgatgatgtcgttcgcatctcttgtctcgttggctatgtcctggtagaactcggttacggttttgtatcccagcttttttatcaggcgcatcatcactgcttcgtcgtattccagcttgcggttcttgaatttacgttctatggtctctttggcgaactctgtctggcgggcttctatctctttgatggcctggcgtattttggttcttgccttcgaagtggtgacgatgttcagccagtcgcgtttgggtgtctgggtgtttgaagtcatgacttctacttggtcgccgctgttcagcgtttgctttaattgtgcgttctttccgttcacctttgctccgatacacttggaacccagtttgctatggatggcgaaggcaaagtccagtacggtcgctcctttcggcatcttgtacaagtcacctttgggggtgaatacgaatacttcgtcttcgtataattccagtttgaactggtccatcacttccaggtcactgtcggcgttctccagtgtttcccggatggaggtcagccattcatctaaaccgctttctccttttacgcctttgtaacgccagtgggctgccagaccacgttctgctatctcgtccatgcgttcggtgcgtatctgtacttccacccatttgccttcaggccccattacagtggtgtgtaaggattcgtatccgttacttttgggtacggagagccagtcgcgcaggcgtttgggattgggcatatacatatcggtcacaatggaatatacctgccagcattcttgtttttccttgtcgacgggagagtccagaatgattcggatggcaaacaagtcatacactccttcgaagggacatttctgtttcttcattttctgatagatggaatggatggacttggtacgccctttcatgtggaactttaatcctgcttcttccagcttgtgctgtatcggttcgataaaggcggctatgtatttgtcacgggaggctttcgtttcgttcagtttgtcttttatatgataatatacgtcgtgttcggtatatttcaaggaaaggtcttccagttccgatttcagtttgtatagccccagcttatgtgccagcggtgcgtacagataggcagcttcgttggctactttggtgcgtgcttctatattgggagtctcctttatctgtctcatcaggttcacgcggtctgcaatgatgatcagaataacacgcatgtcttcggcaaaagagagtagcaggttgcggaaattttccgattctatggtagggcttttggagtatagctcattgattttcacaagaccgcgtatgatccctgctacatcctctccatattcctgttgtacagatgctaaggtgcataaatggttctttaccgattcgtgcagcatgatccccaggatggaagcccgtttcatcccaatttcttcggccacgatgacggcggtctgcatatctttgatgataggattcatcccgaaacaatttcgtggcaggttaccttcggcaactgcttttatgaggtgtatttttaacttatggcaatcacccttctgcaaggtgtcgccggataattgcagcaatcgtttatagagggcgaacagttgctcacgctctttggctgtgaaaaatgctttttcttccataacacgtgaaatcttttcgagggtaaaggtagtttttttctttatttattaggtagtgttctcgcatttttttgtatttttgggcaattaatagtgaaagaataaggtaacaatttatttaaaccatataaaatcatgtacttatgttaacacctgaagacaaagacttattagtgaaaaaaggaatttccgagcagcagattgcagaacaactggcttgctttgaaaagggtttcccatttttgaagctggatgcggccgcttctgttgaaaagggaatcatggctcccgccgaaaatgaaatgaaaaattatttggaagcatgggatacatataaggaaggtgagaaaaccatcgtgaagtttgtacccgcctctggtgctgccagccgcatgttcaagaatttgttcgaattcctgggggctgattacaatactccgaagacagatttcgaaaagaaatttttcgaccatattcatagcttcgcattctacaatgacttgaatgcggcttgtatggataatacaggaaagaatattgatgctttgatggccgggaaggattataaacctatagtagccaatctgctggaagctgccggcttgaactatggggcattaccgaaggggttgttgaaattccatcggtatgcggatggtgtgcgtacgccgctggaagaacatttggtggaaggcgcgttgtatgcggcaggcagaaccggaaaagtgaatgtgcatttcaccgtttctacggaacattgtgaattgttcacaaagctggtggaagagaaggttgccgtttatgcaaagaagtatggagtagaatatgatgtgtcattttctgaacagaaaccgagtacggatacggttgctgccgatatggagaacaaacctttccgcgataaaggcaaactgttgttccgtccgggagggcatggcgcgctgattgagaatctgaatgacctggatgccgatgttatctttatcaagaatatagataatgtggtgcccgatcgcttgaaagaggatactgttacgtataaaaagctgattgcgggggtactggttactctgcagaagcaggtatttgaatatttggaattgctggatggcggtaaatatacacatgcgcagctggaagagatcattcgtttcttacagcagactttatgttgccgcaaaccggatatcaaggatctggaagatgccgatttggttatttatctgcgtaagaagttaaaccgtccgatgcgtgtatgcggtatggtgaagaatgtgggtgaaccgggaggcggcccgttcctggcttataatgcggatggtactgtttcactgcaaattttggaaagttctcagattgacatgaatgatccggccaagaaagagatgttcgagaaaggtactcactttaatccggtggatttggtgtgtgcggtacgagattataaaggaaacaaattcgacttggtgaagtatgtggataaggctacaggttttatctcttataaatcaaagaacggtagagaactgaaagcattggaacttccgggcttgtggaatggtgcgatgagtgactggaacactgttttcgttgaagtgccgttgagtacctttaatccggtgaagactgtgaatgatttgttgcgtgaacagcatcaataacccctttttattgtagattacatggatttatacagatcggaagatttgtgtaaatccgtgtagtttttttgtgaaattaatttatatacccttgattactaacctataattaaaaagaatgaacctgctgacctttattgctccactggctgtggcggcaacttttatgatgccggccgatgccgcaaatcacaaagaattaccggcattgggaaatactcatattcaagtattcgacaagacccctgtttgttttcgtcccgactcttttcctaattatactcctgccaatgctgacggagtgatccgtctggtaaacgggcgtattattttaaagaaaataaccttgcccgattacaaaagagatgtggatgttaccctgaaagtaactgtagcttccaatggtgaccgttgggataaatctggctcttgttttgtgcttcccaaagaatcggtgatcaatctgatgaatatagccgaaggcaagagggcgtttcctgcggtagacagtgccaaatatgaaaaaatgattggtattgttccgggtaaggattatgtgcctacccttgaactgatgcgttttatgaccccgttcggtgtggggtattatagttcggataatgattctttgagcagcaagagacgtcctgtatatatcccgaaatgggaaaagagtgtgacttgggtgcaggatattaccgatctttatccggcattggagagagaggcatacgtgggaatttatattgatacatggactgccgaggggtatgtggccagcatggaattggacgtgaaggagagtaagatcacttgcgacgtgatgccggagcgccgtgtgaagcctttgatgaatacggtgtattatatcggacagacttatccggatattttctcacgcaaagatgtggtgatggattttgatatgtcgaaagctgccaagaatgttcgtttgaagtatattgttacaggtcacggggggcatagtggcggagatgagtttgtggagaaacgaaacattgtgtctgttgatggcaaggaggtgttgaatttcattccttggcgtgacgactgtgcttctttccgccgttttaacccagctacgggagtatggctgataccacgagttgccgcatatataggtgataagggttatacgacaaaagagattgaagaacctttggcttcttcagatttatcccgttccaattggtgtccgggtagcgatgtgatgcctgaggaggctgttattggtgacttgccggccggtaaacattcttttaaggtaagtatccctgaggcacaacaggtggatggcaataaattgaatcattggctggtttcagcttatttggtttgggaggaataacttttcccaattattaatagctgctggagcagtttgaatctttccgaatatgaatggtgaatttctttcggaaggattcaaatcctctttgcggtaaataatgaacattatttgttttttcttttcatgctgcggatgatttctttgtcctccgtgcttacccgataagattctatgattttttgtagcgctttattgtaggtaaagtcatctaaatgattttccttcagatagttcaccgtcttttgaggaaatttgacataacatacggataaagcccatgctacagccatcttcacataatatccttcgtgactgatccggtccatccattgcaatacgttgtttatatactcttcgtcaatataatgagccattgccattactactccgaaacgtatctcatattctttgtcggatttcatccagttttccaaaaatagccagacccttttcttgttcttgtcaacaaaccgttgtttgccgtaaaagtcaaaagtgtcacaaacagaccaactgttgatgatggtaacaaaccgggcaaccagtgaaagatatgcttctatgtctttcattctcagattgcttattaccataccttgcaacatacgttcttccatataataagtatccgcagtctgtagataactctcccagtcatctttggcaatttgtgctcctaaccgccttagggcagggatgcggatacccaatacattttctattcccggatgcagcgattcggtgaactttttatttccattttctgccagttgcagcaaattttcttttatggtcaatccgttgatacgatattcgtccattttgtttttgtaagatagggttagattttcagtcccatgatataatcgttcatataatatccgttgcctatatggaaatctccttctgcaactttttccattcctaaatgttggtagaattgtaaagccttattgttacggtttacattcaagtgcatttcgcaaggtccgggatggatttctttaattgctttgacggcctgctcaaatagtgctttgcccaaccggcaaccttgaaaacgaggaagtacatagattttctgcagatgaaataaatgttctccttcgggctgtatggaaacatatccggcagcttctccatctttgtaagctatgtaatagatgtgcccttcttcttctatttgtttacgcagatttttcggagagtacatccagtccatcatgtaatccaattgttcttttgaaagaatttcctggtaggtggccggaaatacaatctgagccatctcgttaatcaactgaatatcattggttgtcgctttttgtatggtaaacatgatctttatatctttttagggttataacgagagacaaagataaactttttacaacaaaaaaaaggggacttcctttcttttacttgtttaaatattaatttatgcaaaataatagaactatgcaatacaaggtactgatataatacatatatttgtgccaaacaaagtattataaattatgaatgtagacaatgtacgatctcagatgcgcaaaggaatgctggaatactgcattttattgttgttgcacaaagagccgtcatatgcttcggatatcattcaaagattgaaagaagcccggctcattgtagtagaagggacgctttatccgctgcttacccggctgaaaaacgatgacctgctctcatacgaatgggtagagtctactcagggaccacctcgtaaatattataatctcactcctcagggtgaaatattccttagcggattggagactgcttgggaggagttgacgaatacagtgaatcatttaaaaaacaattaaaaacaggatacaatgaaaaagactttaaccataaatttaggaggtaccgtttatcatatagacgaagacgcttaccacttgttggataattatttagctaatttacgcattcactttcgtcgtgaggaaggtgcggaggagattgtacatgatatggaattacgcatatctgaactgtttgctgaccgtttgaatgagggcaaacaggttattaccattgaggatgtggaagaaatcatagcccggatgggtaaacctgaagaactctctggtgaagggaatggagaaacatccggttcggaaaagacaaaagggaccactgtacgccgtctgtttcgtgatccggacaataaagtgctgggtggtgtggcttccggattggccgcttatatgggatgggatgttacttgggtacgtatcattctattggttcttggcttctttgttcatggggtgatattggcttatatcatagcgtggattattattcctatggcgcgtactgcccccgagaagctggctatgaaaggggctgctattaatgtggagaatataggcaagactgtaacagacggatttgaaaaagtgaatgattatgtacgctcagatcgtcctagaagtatcttgcaaaagataggggaggggattgtgtctgtggcggggttccttatcaaattcctgcttgttttcattgctatttgctgtgcgcctgtattgtttgtattattgattgtcttttttgcattgctgatggcggctacggggctgattgctgcattgccggcagtgctttatgaggtgctgcctgcagttaattgggctacggtgggtagctctccggggttgactgtcgctatgtccgttgcaggtattctggttatcggtattcctattataggactgatacacatgctgatgcgtcattttggaggttggcaacccatgtccattgtaaccaaaattatatttatcgtattgtggctcatcgctttgggagtgggtgttttctttgtactgaatgatccaaatattgcttcaatgatatcgtatagtttataaaatacactatctttgcagatggaaagttgggaatcaagaggtgtcttgttctcaactctccgttttttgtaaggaatatcaaacatatataaatactatgactaagaagattttattgctgggttccggcgaattaggtaaagaattcgtcattgcggcaaaacgtaaagggcagtatgttattgcttgcgactcttacgcaggtgctccggccatgcaggtggctgatgaatttgaagtgttcagtatgcttgacggtgatgcattggatgctgtggtagccaaacacaagccggatataattgtgcctgaaattgaagctatccgtaccgaacgtctgtatcatttggaacaggaaggtatccaagtagtgccgagtgcccgtgctgtgaatttcacgatgaaccgtaaggctattcgtgatttggcagctaaggaattaggattaaagacagccaaatatttctatgccaagtctctggaggagttgaaagaagctgcaaaagaaattggtttcccctgtgtggtgaagcctttgatgtcttcatccggtaaaggccagtctttggtcaagagcgcggatgagttggaacaggcatggcattatgggtgtgaaggcagtcgtggagatattaaagaattgatcattgaggaatttattaagttcgatagtgagataactttgctcaccgtcactcagaaaaacggtcctactttgttctgtccgcctatcggacatgtacagaaaggaggagattatagagaaagtttccaaccggcacatattgatcccgaacatttgaaggaagcgcaacgtatggctgataaggtaacggcagctctgactggtgcgggaatctggggagttgaatttttcttgagtcatgaaaacggagtttatttctccgaactttctccccgtccgcatgataccggaatggtgactttggcaggtactcagaatttaaatgagtttgagttgcatctgcgggcggtgttaggacttcctattcctgaaattacacaagaacgcataggggccagtgcagtgattctttctcctattgccagcaaggaagctccccgttatcgtggtgaggaagaagtttgtaaggagacaaatacttatctccgtatttttggtaaaccttatacaaaattgaatcgccgtatgggggttgtggtttgttatgctcctaatggcagtgacttggacgctttgcgtgacaaatgcaaggctgttgctgcaaaggtagaggtgtattaatatcttgtattgatggatataaaataaaggtccgggctttcccaagtccggactttttgttgttccgaaggtatgcttccctggaacaaggttttatagtctctcttttgtgactaacattacagagaaataataatagagagaactccacatcaatggttacggtataataagataaattctttttggcaaaattgcaacatttaataatctcagacaatacctacaaataatgattttgatagataccttttctactttcgtttattatagctataaatagggatgtctgactgtccagaatacctatatcatgcgattgcacagacagatggcaaaccttatctttgcattgtaaataagtcatataaaaattacgtaaaccacaagttagttattagttagtagtctccctgcgaagtgattcgcggggagtgcttcttttatggggtaatttcctttttttatagtgtttcaggttctttgtccaagttggtttctatttgtttcggaaaggatagcttttcattgatggatgagggctatccgtttgcgtagctatgcattcctcctaacagaaaattcactccgaagtaagtaatcagtactgttataaaagcagttatacagaaaacatgaaaaaacatggtgcgatgaaaccatggcagtgatctcggatgcagtgccaaggcatataccagcatggtgattaaggcccatacttctttaggatcccatccccaatagcgtccccatgatacgtttgcccatacagcaccaatgaaaataccgatagcgagtaagaaaattgccggataaagaattatttggcttattatctgcaatcgttctatttgttctttgcattctttctgtgattggtggagtatgaccgctgttacaccattcagcatgataaatgccagcagcgaataagcgatcatgataactactacgtggatactcaataatggagattgcagaaccggcatcagttgtgtgatttgtgggtttgattctcccagcatggataccatcagcgtaagtccgcaaagcaggaaaccgaaagggagcaacattgcgaatttacgttgtagcagaaaagtgagcaatagcgtacaccatgccatgaactgcatggtttcgaagccgttggacaatggcagatgattgctcacataaccacgcaggcagatagcagccgacaaataggtaaaaacaatccatagcaaaatattcaatattatgattgccttccggcttgttctcttttgcgatgccatgcaatggcaataatagataaaacatatcaggccgatgcaaatacatgccatggcgacagatttgctataatcaaattgattatatattttctcagccttgaatttattatctgcaggaagcagtccgtcacactctttctgctggtatttcttgattttttctaataacaggcaggcatcattgtactttttcatcacaatcatttcgtttacataactcatagatttacgaatgaatacccatttgtcattatccatatcttgaggtaattggtcgctttgcgaataccattccaatgtctttccggctatattgcgacaagggaatattttcatcatggcaccggtacatactaaattgatgatattgaatttctcatcagcttcttctatgcctcgtttgtcagtcacctgttctcctgaacggatatggttcatcattttttccagcttgtattcattaatggtactgatatagtctttcagcctggcgtaattcccttctatttccagtaatttacgggcttcattactcttgattcgtataattggctcatttttccaactgtcataataaaacagccatccggtaagtacttcttctggtgtcagtcctttatatgaggaactaccgtaaagtttgactgtaaaatcacgggcaaaggtttgtaaaggacagatacggttgttgtataaaatatataaatctccaaaatgttcggctacttcgcgcggaagcaccttgggggatggactgtttgctttgagaaaattactgttgagactgaatgcgaataaaagcaagatgactgtcaagcttctgtgtagcaaagggcttttcagcagttggcggaaccgactttgcgggctgaagaaaaagaaaacggtggaaagtagcaataaagtatatcctgcataagtgattcctataccataaggatcatgagatacactaaatacgcttccttcattatcttcactgtagcctgattgataaaagcgatagtgctggtatgaaaatatatgattcatggaaaccttcccctgtatctggcggtggcagtctttgtctgctactgaaatatgactgataaagtccattggagccaaggttcctttgtaataaataatttcaaattggtttagtgtgatgctgaaaggtagccggtgggaaattcctttggaatcggtgaaagaggtctgttgttctccttggcggacacgcatagtgccttgttctccatatatccatgtggtgaatgcccctgccaatataaagagaagagaaagatgaagcaaaaaaataacaggctgacgatgcagtttgctttttatgatgtataataaggaagtaattgcggttactccccataaaatgacaaaaggtacggaactgtagatatactcgtttacaaagtccgtaccatatattttttccaatatagtagctatagtaagaatcagaagtaatatgcctagcagactgaaggcagttcgttttaataatttcatgtagttataattttctgaaagataaccagaaggtgaatcttgaatttgtctcatccccctgaatgtcctgtcatattattggtgataggattcaggagggagacaatctgtttcattgcttaaatggcatcaataaatttgacgatggcgtcacgatcttctttactgagttcacggaacttgtcaatgctccagcgtgcgtcactatttgaagctccatgccacataatggcttcaatgacattacgtgcacgacagtcatgcaaacggtcgctgtgtccggcacagattaaggaaagtccgcgtccccaaagaggagtggtacggcaccatcccgtgcggatattgttcttcatttccaggcggtgctgaaccatatctgaatatggccagatagtttggtgtggatagcgtggcagacggctgtcaccatctttgaagtatccgttcggatcgggataattatcgtctcctgtagtccatgacggacgatggcaggtagcacagcctatttcacggaataatttgtgacctctctgaactgtttcgtcatccagattccgtgcggcaggaactgccagtcctctgtgccatatcatgaagtttacataatcttcgtctgtcatttccaccggaagttccttattcatcagatagttgtatatatcttgttctacattaccggtctgtttccattcagggaaatagttataaaaatctttttgtacatccgggtctttggaggctgttttggcatacgtgtcagtcatgtagtgataacggcggtcactacgggtaacattggtgatgttccagattgcattggcaccgggaccatcctgtatggaagatctggtcaaagcgtaagtataacgtttgggatattgtttacctgtaagtcccttatagagtgaagtccactctccgtttgcgaagatggctggattcaattttacacctgctttttcctgacgtgcatattctgctttcaacgaatcatcgggaatggcatctagtaatccggttccgtagataccaatggtagattccagcaaaactactacatcagagtagttgacaggggtgacaacttgattataagtagcctccaaaggtacgtagtatgcatcttgaggaatagtcacttccggatagatcagactgtatgtttctccgtcaggaaatttatttccccattcgtctgtgtaaggcagccagtctatttttatcttatcttcatctattggtgctttgaaaggggctacagctttggtttgaggcattcccgttaaagaacttaggtagttatcctttccatcggtcacaacaagtagatatccatttccccagtcatcagcacgataacggtctacccgtttgccatgaccgtatccggggtggcagttcatacatgaattgcggatataaagcggtcccaaaccattgaaaggtttggaattctgcgtataagaacgttcaaagaaatattccccatatttgaatttgtcggtcatacctgcattttccgttgcaggggtaggatcttcataagcagaagcggaattgttgaaggttgtacccaattctccgcctgcataggtctctacatttacgttgatatcaggattgacttccggagatttgttttccggattgtcatcgtcattacaggctgttagcgagagcattgtaaggccgcatagagcagcaagccagtgtattttaaataacttattcatataagaatgtttaaagttagttacttttcaaatttatataccaaagaatctacataaggttgtcctcccccggtctttttcactatcatgtctgttgtagaggggacatccggcagcacaaagccggtgcttggagcgaatgtaaaatcaccatctacagcaaaagatagtacaatagaccttttccggacaccctcttgcagatcctttgtggtcattggggtaaacagttctttttaattgtttcttaaagctgttttaacatcagacaatatggcatcaagatcctgacaagctttaattgcttcacctgcacttggatctttaatattgtttacaaatggagctgccatggcattgattttggtcagagcattgtttatggcatttacaacttttgtatccagttctttatctactccagcaatatagttgtgtagtgagttggtttcgtcacgttcattttctataccgcccatgtaagcattctgaatactgatgatgttgtcataaaagtctagaatggacttgtgactgtatggtgattctatataagcagggtcttctccgctataaggttttcctattttagaagttcctacttcatctgcgatagtcttgcagccgtcaatgatagcttgcatggctaatgtccagctggcgtatgtactacctgcttttcctgcattcagcatattctcaccataagaatattcaccactgtttacagtgtaaggcagttctaactcatttgcgactttagcgacacggtcggcattgacagcactttcgcctctccatgaaagttccagctgccagcaacggttacgcaaatcaccagctacagctacggcgtaagtcagatgtaagtcactgattttagaaactgatttggggctaccatcttcgaaaaggatgtattcaataccatgaaatcctaataaagaattacccaatttctcgccggcataaatatctccgtcttcaccacccattgcttctacctgttccgtatttttcagtgcggtctgtaatccgtccaagtccaaaggccatgagtcaatatgcgggtcgataccgaaatcggtagctgccccatacaggaaagcttcactcttttcccaccatgcacgtgcttcaaggaaggtttcgcaggtagcttttacatttgcatcagtcttgctgctttttaatgcttgtaaatcttttactagctgttcggtttcatcagccaggttcttgtaagtaacatataccgtgtgatcaagatactgttttgcgattgcttcgaattttgcatctgtttcagacgtaccggtatccggagtcggatcatcgttatcactgcatgcgctgaaactgcaactcatcattgttgctacagcaacaagtaaggggaattttaacaaacttttcatacctatttaattttaaaaaatgaataatcgggtttatttaatgaaaaatcctgcataagctatgcccaatgaaaaagagggttcgttattatactggcttttcaagaagcgttttgagtattcggcttttactacgatgtctttcataggatagtagttcaaaccgacggccatgcgttgttttttagtccattcatatttgctgaaacctttagcagccttatgatatgagtcatagtattcatatcgtccaaatacatatagttttttaccattgtctctcattttctttacttgagaaaaaatatcatatcctgcctcgattccggcggcaatggctgtcttgcccacggctgtgtgaggataaggggactgtgtgctattgtcttggcttttgttgtgagtggagatcagatcagcgtctcccagatggccataatcaaaattgccgcgtactacccagttatgatcattataatcaaagtcgaatgcacctatgaccactgttcctttcacatctttatatttggtggatttttcatctttaataatgtcgttttggaaactgttacctatatagccgcttattcccatacgcaatcctttgacagagtaattgtcgatacgtgccgctcctgccagattgttggctactttaaattcataggctgatgcagaaccatcatgaatccatccgctatgattgaacatattagcattcaatgcgggaataaccattgcctcataacgccagtcacctatacgcccccatacactaagaccggtttcatgccatgtgcaaggcattattgtgttttcaccttcaggacgatatactgtaaagaactgagtgggaagatgggcgttgtttatttgtcctatcggcacgatgatgtgccctgcgcggatattgaagcccgagcaaaaagatttctgaatccagaactgctccaaagccacttcacccccacgttctatttctttttcaaattctccggcttcttcgtcttctacttctatagccgattctgttcctccgtgttcaaactctatttcactacccatgctccatccttttccgaaatcgtagccaatcatgattactacatgaggtaagtctacgcgtccgtgtccgtcagagtctttgtaactgtctgctttagaatagcggtacatattgtcactataaaaattacgtgtgtacactgcttctccgtaacctcccaatgttagccgggatttttttttaggttcttcctccgtagttttctctgtgttatccttatctatacttgttgctttttctgcataactgtttgcaagacaggccgacaagcataatgagaacaataaaacctttcttttcatttttgctttaatttttataattttaaatcggtgcaaagttatgggaggttaaaagggtgggcaatacctaaaaatgggtattattttatgaaaattggtaatgagtaggtattaaagcttgaatgatgctgtccggaaaggtttattaccctgtttttcagttgtaaaatgatgcattaaaatttaagatggcaaaataatagtctgttttagtctttccacatatggccagatgcatatcttcttgccacatgcttttttacctttttaaaagaagggtgttaggggatttttctctgtaaagagtgcaagccttgtaatcagattcatccttaaaagatcttgtttgtatccctaaccctttcctgccgtgtggttaaggtttttcttcctgcttgttttatctccgcaagcctttggagttatctccataagctttggagttaactccatagtcttgggagataactccaaaggctatggagatagaatatatctgtataaaaaggtttaatctgaagatagaaaagacttatacaatagggaggatatgaacattcatttaattccgttagcgggttattgcttctttcagcccttccggccctttgaacttcatggtggcggaaagattgatttagtcattctttttttcttggtccggattcgtaatgacttcttcgttttccggatgactgctgttgtcttcctcttcctcgtcaatgaaaagttccggttgttgggggcctttgtgtctgaacaatatggctgcggctattccggccgccgcgccccccaagtgtccctcccaagaagtggtggaggaggcgaactgcgggaacatgttccataccagactgccatatagaaaagtgacaagcaacgacagggctactaaagggacgtgtttgcggagaatgccactgaagaacagaaaaaaggcgagtgaataaattatactgctggcacctatatgccatcccggcttgcctattataaatgtaagtattccactgactatccagatgaaaaaaagtataccaatgcccaaatcacgataaaagtagagcagacaccataataaaaaaagaagaggaaaagtgttcgcaaataaatgtccccaatcagcgtgtatcaatggagaagtgaaaatccccattattcctttggtttctctgggatatatgccccaggtgataaaatcccaattcatgacactttccattgtacgcagggtgtacagaatgaaaagaagtaataacggaagagcaaaagccaatagaattttttgaatttcaagtttcattttgtcataattatgctgatttctgtgcaatactacggatatttgagcgaaaaatgaaaaatattttgctatttaattttgctttatccatttaattactaattttgagcgttgcatacaaaaataatatgtgacataaattgatatggaaatttgatttataaccttaaaataacaactatgagttacttacgatttgacaagactcttatgacgaacctcggggaatcattaccgaaagaaattctccgcacaaaccgttcaggggcttaccattgtacaaccattgttgattgcaatacgagaaaatatcatggattgcttgtcattccggtgcctgaactggatgatgaaaaccatgtattgctatcgtcgttggatgaaacagtgatacaacacggcgctgaatttaatctgggacttcataagtatcagggcgacaattacagcccaaggggacacaagtatatccgggaattcgagtgtgagaaagttcctaccactatatatcgggtaggtggtgtgattctgaagaaggaaaagcttttcgttcatcatgaaaatagaattttaatccgttatactttgttggaggcacattcggccactacgttgcgtttgcgtccgtttctggctttccgcagtgtccgtcagtatactcatgagaacgcacaagccagtcgtgactatcaggaggtggataatggaattaagacatgcatgtatccgggctatcccgaattatatatgcaattgaacaagaagaacgaattccactatcagccggattggtatcggggaattgagtatcccaaagagcaggagagaggatatgattttaatgaagatttgtacgtcccgggttattttgaagtggacataaagaaaggtgaaagcatcgtcttttcaggaggtgtgtccgaggccagtacccgtacattaaagagaacctttgaagaagaggtggaagaacgtactccacgtgataatttccagcactgtctgataaatgctgctcatcagttcttgaataaacaaggaaatgagttttatattctggcaggatatccgtggtttaaatgccgtgcgcgcgatatgtttatttccctgccgggactgacattggcgattgatgaagtggctaagtttgaaatggtgatggaaacggcccgcaaggcaattcatgactttattaatgatgagcctgatgatgttaaagtgtacgaaatggagcaccctgatgttttgctttgggcggtgtggtgtatccagcaatatgccaagatggtgtcgcgcgaccaatgccgtgagaaatatggtacattgttgcaagacattatggagtaccttcgccgggagaatcatccgaatcttttcttgcattccaacggtctgctatatgccaacggcacagaaaaggctatcacatggatgaattctaccgcaaacggacgccctgtgattcctcgtacaggctatatcgtagaaattaatgctttgtggtataatgctttacgctttacaagtgaactattgagcgaaggtggaaacaataatttggctgatgcgttaaatgtattggcagaaaagacggggaaggctttcgtggatactttcttgaatgagtatggttatttactggattatgtggatggcaatatgatggactggagcgtgcgtccgaacatgatatttactgtagcattcgactattctccgcttgatgcccgtcagaagaaaggggtgttggacattgtgaccaaagaactgcttaccccgaaagggctccgttcgctcagcccgaagagtggtggttacaacccaaattatgtaggtcctcagatgcagcgtgattatgcttatcatcaaggtaccgcatggccctggctggcaggcttctattttgaagcttaccttcgtatttataagatgagtggtataggatttgtggagcgtcagctgataggctacgaagacgaaatgacttctcattgtattggctctatacctgaactgtttgatggtaacccgcctttcaaaggtcgtggagctgtatcattcgctatgaatgtggcagagatattgcgagtattatatttattgagtaaatacaattattgaaaggagggacctgtatgaaagtattaatgtttggatgggaatttcctcccaaaatatatggtggtcttgctgtagcatcttacggtataacaaaaggtttgagcctgcaaggtgatatggaaacaaccttctgtttgcccaaaccttgcggcgacgaagaaaagtttctgaacattataggcatgaaccaagtgcccattgtgtggcgtgatgtgaattacgattacttaaagtcacgtctttcgacttcgactccggaacagtattatgctttccgtgatcatatctattctgatttctcgtacatgcacgtcaatgacctggggtgtatggagtttgccggcggctatccgggaaaccttcatgatgagatcaataatttttctattattgcaggggtggttgcgcgccagcaagaatttgatattatccatgcgcacgactggctgacttatccggctggtgtgcatgccaagctggtaagtggcaaacctttgtgtatccatgtgcatgctactgattttgaccgttcgcgcggtaaggtgaatcctacggtatatgctatggaaaagaatggcatggatcatgccgactgtattatgtgtgtgtccgagctgacccgtcagacagttattcaccaatatcatcaagacccgcgcaaatgttttgccatgcacaatgccgtttatccgctttcgcaagatttgctggacattcctcgtcctgatcattcgaaagaaaaagtggtgactttcctggggcgtatcacgatgcagaaaggacccgagtattttgtggaagccgccgcattggtcttgaagcgtacccgtaatatccgttttgtaatggcaggatcgggagacatgctggatgccatgatcaatctggctgcggaacgaggtattgcagaccgttttcacttcccggggttccagcgtgggcgtcaggtttatgaagcatataaaaacagtgatgtattcgtaatgccttctgtgtcagaaccttttggtattgctcctttggaggctatgcagtgcggaactccttctatcatctcaaaacaatcgggttgcggtgaaattttggataaagtaatcaagaccgattattgggatatcaacgcaatggccgatgccatctattcaatttgtacgaatccttctcttttccaatatctgcaggaagaaggaaagaaagaagtggatggcattacatgggagaaagtcggcttgagaatccgtgccctctatgagcaggtgttaaaaaactatggtaaataataaaacaataactaggatatgaaaacaatatgtctttattttgaaatacatcaaattatccatctgaaacgctatcgctgttttgatataggccgtgaccattattattatgatgattatgaaaatgagcgcggcatcagtgatatagccgaacgctcgtatattcctgcgctgagtgcgttgattgaaatggcaaagaatcacggtgatactttcaaggtggctttgtctatctcgggtgtggcgctggaacagttggaagtgcatgcgcctggtgtaatcgagttgttgcatcagttgaatgagaccggatgttgcgaattcttgtgcgaaccttattctcacggtctttcctcattggctaatgaagattgtttccgcgaagaagtggaacgtatgcgtaccaagattaaacaaatatttggcaaggagccgaaagtattccgtaactccagcttgatttattcgaatgatattggcgctacgatagctgatatgggctttaaaggtatgttgactgaaggtgcaaaacatattttgggttggaagagtccgcactatctgtatcattgcgccatgaatccgaacttgaagttattgcttcgcgatttcaaattgtctgatgacatcagtctgcgtttctctaattccgaatggaatgaatatccgttgtttgccgacaaatatatagattggattgcagctttgccggaggaggaacaggttatcaatattttcatggaactttctgctttgggtatcgcccagccattgtcttccaatattctggaatttatgaaagcactgcctgtctgcgcaaaagaaagaggggttactttctctactccgaccgatatcattaccaaactgaaatctgtggatcaggtggatgttccttatcctatgtcatgggtagacgaggaacgcgatatcagtccgtggttaggcaatgtgatgcagcgtgaggctttcaataaactttatagtgtggcagaacgtgttcatttgtgcgatgatcgccgtattaagcaggattgggattatttgcaggcaagtaataatttccgcttcatgaccactaagaataccggtatttggttgaatcgtggaatttatgattctccgtatgatgctttcaccaactacatgaatattttgggtgattttataagtcgtgtcaattcgttgtatccggtggatatggataacgaagaattaaattcgttgcttactaccattaagaaccagggcgaggaattggtggctttgaacaaggaagtggagagattgcaggctaaactggagaaagctgaaggcaagaaggcttctgccgtaaagaaagaacctgctgccaagaaaccggcggcggcaaagaaagcggcggcaaagaagccggttgccaagaaagctgcttcgaagaaagaagaataacagaaatagtataaaggacttaagaattcaccgttgtgctttcggaaaactggttttaaggttggaagaggcggaacggtgtttttctatataaaagtttgctgcattgaatattttatttacctttgccaatctcagatacgaaaaaatatgaaacaattgtgccagaataaacatacgatacgtttccgctattggaaccggaagaagtacgctatattttatagtttgggcaaatgtgtaactattggtaacctgaaaaaggagattgccgatgtatcgttgggtaaacaggcaaatgtttgcacggcattctctgtttgttcttccgcacgaaaagaggatgctggagaggaatatgaagaaggaatgccccctgttgaatctatgttgcaaatgcttcggacccaactgcctcaaccacaggtggctgatgtgatttgtcttttttatttgaataaatattgtttgccggaaagatgtgccatgcatcttttcggcttttttgtcttaatatgaactgtatatgatgctgaatgaaataagaaacaaagtgctgggcggtgagaagattaccgtagaagaagcctgttggctgtcctgcaaggcagagaaacaggatttgtatgatgcagctcatgagataacacaggtctgggcttcccggaaattcgatatgtgttccatcatcaatgctaaatccggtaaatgtcctgagaattgtaaatggtgcgcacagtctgcacattatgaaacaaaagtggatgtttatgatttggttgggaaggaagaatgtctgcgccatgctttgtataacgaagcgcagggagtatcccgtttttctttggtgaccagtggcaggaaaccgggtagccggaacttgaaccggctatgtgagacaacagaatacatgcgtgcgcattcgcatattcagttatgcgcttctttaggattgctggatgaggcggaattgagacggctgtttaaggcaggcatcacccgttatcattgtaatctggaaacggctccctcttatttttcatctctatgttctactcatacacaagaacagaaattagaaacgttgcaggcagcacgcagggtggggatggatgtatgcagcggaggaatcatcggcatgggcgaaacaatggaacagcgtattgagtttgcttttacactgagggaattggaagtacagtctattcctataaacctgttgcagcctatacccggcactccattggaaaaaatggatcgtcttgcagaggtggagattctgacaaccatcgctttattccgttttatcaatcccacagcatttcttcgttttgccggagggcgttcactgatgagtgtggaagctgtaaagaaagcattgtatatcggtattaattctgccattgtgggagatttgctgactacattaggttcaaaagtatcagaagataaaatattgatagaagaggccgggtattcgctttgatacattataaagttattataacaataaggaagtaatatatggaaaattttgacagggagcatttatggcatccttatacatcgactactcatccgctgcccacttataaagtaagacgggcggatggagtatatatagaattggaggacggaagatgtttgatagaagggatgtcttcgtggtggtgcatggtacatggatacaatcatccggtattgaaccaagcgctcaaggaacagatagaccgtatgagccatgtcatgttcggcggactgacacacgatccggccatcgaattaggcaggttgttgttgaagattgttcctccccgtatgcagaaaatattttatgctgactccggttcggttgcggtggaagtggcattgaaaatggccgtgcaatattggtatgcgcaagggaaggaaaagaaaaataattttgtaactattcagtccggatatcatggagatacgtggaatgccatgtctgtttgtgatccggtgaccggtatgcatcatatttttggccctacattgcctgtgcgttattttgttcctgctccccggtcgcgctttgacggaatctggtatgaagaggatatagagcccttgagggaaatattggaacagcatcatgaagagatggccgcattgattctggaacctattgtacaaggggcgggcggaatgcgtttttatcatcctgagtttttacgccaggcagagaaactttgcaggcaatatcggctgttgttaatctttgatgagatagcgacaggtttcggaaggacggggaaactgtttgcttgggagcatgcgggtgtccagcccgatatcatgtgcataggcaaggcactgaccggtggatacatgactttctctgctgtccttgccagtgatgatgtggctgatacaatttccggcggttatccgggagtctttatgcacggccctacttttatgggaaatccgttggcttgtgccgtagcgaaagcatccgtggaattattgctttcctatagttgggaggaaaaggtaaaggccattgaatcacagttgaagagggagctggcccctgctgctttcttgccacaagtggctgatgtgcgtgtattgggagctatcggggttattgaagtgaagaaaccggtagatatggctttcatgcaacgtcgttttgttgaagaaggggtatgggtacgtccttttggaaaactggtgtatatcatgccgccttttataattcagcctggagaattgagcaaattgacgcattcactggtgaagatagtaagagaattaaaagaataagtgatagtactgagagaaatagaaaaaatgaattcattaacagattgggaaagggaattagccctgcttgaaaataaaagtaatcttcgtaagttgcctgttatccgtcatttgggaagagaggtggaggtgaatggaaaagtgatgcttaacctttcatccaacgattatctgggattggctgcttatctgccattacgtacggaattcttgcaaagtcttactcccgacacctttcttccttcctcttcatcctctcggctgctgacaggaaattttgatatctatgttcagatagaggatttgcttgcccgactgtatcggaaggaaagcgcgttggtttttaatagtggttatcacatgaatgccggtattcttcctgcagtgagcgatactcgtacattgatccttgccgataaactggtacatgccagtattattgacggcattcgtttatcggcggccaagtgtatccgataccggcataaccggtacgaacaattggaacagttgctggtttccaatcatgccgggtatgatagaataattattgtaaccgaaagtattttcagtatggacggtgatgaggccgatctccgtcgtttggtcactttgaagcaacaatatgataatgtattgctgtatgtggatgaagcgcatgctgtaggggtgcgggggatgcatggcctggggtgtgcggaagaacaggattgtgtggctgacatcgatttcttatgtggaacttttggtaaagcgttagcctcggtaggaggctatattgtttgttcgaagaccatccgtgattatttggtcaataaaatgcgtacattcatatttacaacggctcttcctcctgtcaacttgctatggacattctttatcctggagcatttgaacagtttcagcttccggagggaaaggttgaagaagatatcctctcttttgaaagacgcgttggtaaagaaaggctacgcttgtccttctaccagccatattctgccaatgacgataggcgatagcggtgatacggtgttaaaggccgatttcttgcagcgtaaaggtttttatgcgttgccggtgcgtcctcctactgtgcccgaaggaacatcgcgtatccgtttttcgttgacagcggatattactgaagaagaaataaaaagtctgatagaattgatatgaaacattattttatacaacaaaattattttccccgattgacacttttttttgccggttggggaatggatgaatgtcctttcatggattattgctccggaaatagcgatctgttggtttgttatgattatcgttcgctggattttgatttcacgctgttgcagggttatcaggagattcgtctgatagcctggtctatgggagtatgggccgcgtctatggtattgcaggatatggacttgcccatttgtgagagtgttgctttaaatggcacggtaactcctgtcgatgatttgaaaggtatttcgcagcaagtttttgaaggaacactggaaggcttgaatgaggttacgctggaaaagtttatccgcaggatgtgtttgaaaaaggagaatctggaaacattcttgtcgaaacgtccgcaacgtgcggtagaggaactgcaagaagagcttcggaggattggagaacaggtaaaatcttgcgctgttcccagttttgcatgggaacgggctgttataggcaagaatgatttgatttttacggcggtcaaccaaagaaatgcatggaccgggacggaagtggcagagtatgatattcctcattattcagaagaaataatgagagatttgctatgcccgtctgtcatttaaaatgaaaacgtatgattaataagcaattgataacccgtcgcttttcccgcgctgtagagagttataaccgtgaggcggtggttcaaaagcagattgcataccgcatgagtgatatgctaaatcattatttgccccgtccgtgcggccggatattggaaattggtagcgggacgggctttcttacccgcaggctgatggaaaccctccatcctgaaaaactggtgttgaatgatatttgtcaggagatgagtacttgtttcaccgatttgttgggaagcgggcgggctatctttctggcaggggatgccgagtcccttccttttccaaaaggacaggatttgattgtatcatgctcggcattacagtggtttgtttctcccgagctgttttttgaacgttgtaatactttgttgaagcagaaaggatattttgcttttactacgttcggcagggataatctgaaagaagttgcatcggttaccggcagcggtcttcactatcgttctttagaggagttagaagaagcactgcgcatacactatgagattgtgaaggctcatgaggaacgtatctgtctgacttttggcactccgctcgaagtgctttatcacttgaaacataccggggtggctgctgtcaggcaacaagcgtggactaaaaggaatttgcaggatttctgtgacaagtatgcccgtttgttcagtgatggtcgttcggtgactttgacttatcatcctatttatattattgcaaagaaaagacaatagaaataaaaagaatcatgaaacagaatgtatttttcgtaagtggtattgatacaaatattggtaaaagttatgccacggcctatctggcacatctttggaacaaacaaggatgtcgtactattactcaaaaattcatacagacaggaaatccggaaggttattcggaggatattgagttgcatcgtcgtctgatggggacggagtatttgcctgaggatgagcagggacttaccaaacctgaaatattttcttatccggcttctccccatttggcttcacgaatagataaccgcaccattgattttgataaaataaagcatgccacggaggtgctgagtgagcgctatgatgctgttttagtggaaggagccggggggctgatggtgccgttgacagaggagaacctgactatagactatattcaggaatcgggttaccccttagtttttgttacttcgggacgattgggaagtatcaaccatacattattgagttttgaggctatagaacggagagggataaagcttcatacagtgatgtacaatctgtttaccgaaggagaagataaaatcattcaggcagatacagaggcttatatttgtcgttatatagagaagcatttcccggatacagcatttgtgaaggtgccttgcttgtaattcatctttcttgtttatgatgtgtctacctaataaaaagacaggccttgtttcgcaacaaagcctgtcatgcaaacttaaaacaaccaacaaaagaaatagataatttcgggcaattatctaataaaaagcaattctctgtatttaggtaatgtccacatctgattgtcaacaatcagttccagcttgtcaatgtgataacgtatctcttccagcatgggggcgatagtgtcatgataggcgattgctttctcccgttcactttctatcttgttagccaccttacgtgcttccaccatggcttccacatgctcggtgatgaagatggtgcgttctgcaatctcttcaataagtttcatattctcggcagatagtcgggacgctttttctgcagggaataattctttcattttatatacattgtcaatcagtttgctctggtattcggtagccacgggaataatgtgattcatagctaggtcaccgagaacacgagcctcgatctggattttttttgtgtacatttcccacttcacttcgttgcgggcttccagctctttgcgcgtcatgacgcctgttgcttcgaacatggcgatgctttcgggtttcaggtaattgtcgaatatcagcggacaactggtttcgcagtccagaccgcgtttggcagcctcagctttccattcgtctgagtaaccgttgccatcgaaccggataggtttgcattccttgatgtattggcggatgatttccacgatggcggagatttttggctctcccttttcaatcaatgcatccacatcctttttgaatcttgtcaactggtgcgccaccgccgtgttcagtgcaatcatggcactggcacagttggcttccgaacctacggcacggaattcaaagcgattgcctgtaaaggcgaaaggagaggtgcggttgcggtcagtgttatcaatcagcaattcgggaatctgagggatatccagcttcattccctgtttgccagccagcgaaataaggtcatcatttgcactttcttccatgtgatccagcacttgtgtcagctgtttgcccaaaaaagaagagatgatggcgggaggtgcctcgttggctcccagacgatgtgcattggtggcactcatgatggaggccttcagcaatccgttatggtggtaaactgccatcagggtattgacgacaaaagtaatgaaacgcaggttgtcttcggctgtctttccgggagccatcagcaggataccggtatctgtacctaatgaccagttgttgtgcttgcctgatccgttaactcccttgaatggcttttcgtgtagcagcagacggaaaccatgattacgggctactttgcgcatcagtgacatgatgagcatattgtgatctacggccagattacattcttcgaaaatgggagccagttcgaattggttgggagccacttcgttgtggcgggtctttacggggatgcccagttccaatgcttggatttccaggtctttcatgaaagctgccacacgggtagggatggccccgaagtaatggtcttccaactgttggtttttgctggcttcgtgtcccatcagggtacgtccggtcagtaataggtcggggcgtgcggcgtacaggccttcgtctactagaaagtattcttgttcccatcctaaataggccattactttctttacttcgggattaaaataatggcagacatcaactgctgctttatttacagcacttaacgctttcaacagaggggccttgtagtcgagggactcgccggtgtaggcgataaatacggtggggatgcacagggtgtcgtctactacgaatacgggggaggaggggtcccatgcactgtagccacgtgcctcgaaggtattgcggataccgccattagggaaactggaagcatcgggttcctgctgtacaagtagtttgccggagaattcttccatcattccgcccttgccgtcgtgttctacaaacgcgtcatgtttttcggcggttccttcggtcagcggctggaaccagtgggtatagtgggttactcccagttcggttgcccagcgtttcatgcctgcggctacttcgtcggcgatgctgcggtccaaaggagcgccattgtccatagcatctgtcagtttggcatagacattgctaggcaggtatttgaacattttttcacggttgaatacatacttggcaaagtattcaccgggcctttgggcaggtgtttctactgttgctgctttcttcttgaaagctgtttcaactactcggaatcttaattttgacataatacctaaatttgtttagttgttaatttatttagagtgaatgattttctctttattattttgattcaaaatgacttttagttgtatgcagattcgccatgttcataaatgtcgagcccttcttcttcaattctgttcgggacgcgcaaaccatgaatcttgtccaatcccttgaagatgaggtatcccatacctgctgcccagcaacctactactgttgtaccgaacagttgtgctagcaggaagttgtaaccaccaccatagagcagtccttcttcggtggcgaaaagtccggtaagaatggtaccgaggcaaccacaaacaccatgtacagaggaggctccgaccggatcgtctattttcaatatgtggtcaatgaagtctaccgagaaaatcatgacgatgccgcagatggcaccgatcatgactgctccgaagggggaaacgagatcacatccggcggtgactccgaccagtcctgccaatacaccgtttaatgttaatgacaaagaaggttttccatattttatccagcttgctgtcaaagcgaagaagccaccggcgcatgctgccaggttagtggtcaggaatacgtgagagataactgtctgatcagtaccggtagctgctgccagttgagaacccggattaaaaccaaaccaaccgaaccaaagaatgaatacacccaggcaagccaatgtcaagctatgtcccgggatagccttagacctgccatctttaccatatttaccgatacgcggtcctagaacggcagcacctaccagggcaatccacccgcctactgagtgaacgacagtggaaccggcgaagtcatggaaggtggttccgaatatgtttgtcataaaagaattttcttcaccattcatcagccatccgccaccccacgtccagtgtcctgataccggataaatcagtacgctgatgaagatggtgtataccaagtacatggagaatttagtacgttctgccatagctcctgatacgatggttgctgcagtggcacagaatacggtttggaagatcagaaacccttcaatgggtagtccgttgtcaatgactttgtccattatgtcaaggttgaaaaaatgtggcgtgcctacgaaacctcccacaccgaacatcaatccgaaaccgatgaaccagaagaggatggagccgaacataaagtcaatcagattcttcatcagtacgttggcggtattcttggtgcggataaatccagcttccaccaaagcgaatcccggttgcatgaagaataccagcatggctgccagcagcatccatacagtattcagaccggttacaatttcattgatggcttctgtgtccgtgctcctgacaggagtttccgatagtgcgtcttgtgcccaaaggctggctgggaacagaaataaaagtataaagagtcttttcaggtatagtttttccataccttttctattagttgtatccataattttttcgcttaagttgtagtatgatttttactttgtagagtagttttgaccggggtgtgtaatgagttatttctcttgttctgcattgtacaaggcaatatctccacgttctcctgtacggatgcggatggcatcttcaacgggtatgacgaagatacgtccgtcaccgatctcgccggtatgagcagccttgagaatggcatgaatggttttgtccacattcttttcgcggactacaatggaaaccaggattctctcaatggaactggtgtcataaaccactccacggtaaatgcgtccttgacgtgttttgccaatgcctcttacatcgtaataggaaaaccattcgatttcggcttcgagcaacgcttcttttacgtcctcgaatttggtcttacggataatagcttcaatttttttcattgttgtatttgtattttgtatataatgtaatctttttaccttctaaaaaactgataccttgttgttatccttgtatttatgctctttatgattaaaaacttagcccgaaaacgaaataagccccttcagtgcgtgggtttacggtgacttttgcaaaagctggaacggaaaatgaatcggtgattcttatctccttggcggctcccaggctgatgtcgcatacggcgaaaccgttggaaccgttgcatacagggtcttcggaatagttgtaaaagtctgtggcccacggagtcgctcctatttccgctgtccattccagtcctgccagtgtgaaaggtacggtagccgagatgtaggaagaataggctctgtctccttcgttattcactccgtcggttccggcgaaattggtataccagttcaaggtcagcggtccgaagtcataacctatctgtgcctcgaaggtatggttggtattgtgtgagccgtaatggaaataccccggtcctccattgaaccagtaatctgtgacggagatactgaaccctcctgtggtgtagcctaatgtgaggtcaatctcttttgtatcttctttttcgatacctgctgttccccatgcagacaatgagaaccctttgtaagaaactgacaacgtgggttggatactgacaccccccaaatcctggccacgccagatgtatccgcttacaaagtcggctcctacgctggcttttactttgtcctgcgccatgcccattgccggaacagctattgccaaggccgacagaaatgttgtttttctaaaactctttttcattgctttttacctttttaattcataatagtgagtttgttatatctcgtatgtatttgtttttcttgtaatggtttgtgcttgttatgtgataaatgttgtttataatatccatcgcctgattcgtttcattgcctcttcacagtccgcgcgttcgccgaaggcggtcagccgtatgtaaccttctccactgggaccgaatcctactccaggagtacctaccacattggcttcgtacagcatttgttcaaagaacttccacgagctgattcctcggggagccttcacccataaataaggtgcgttctcaccgccgaatacttttagtccggtgctttccagtccttctttcatgatgcgggcgttggtcatataatagtggatggtggcttttatctgttcctttccttcagggctgtaaatggcctccgcaccgcgctgggtaatgtacgaggttccgttgaacttagtgcattggcgacggttccacaaccggttcagcgggatgcgttttccttccaatgtggcggcggtcagctccttgggtactacggtgtagccgcaacgcactccggtaaagccggcggttttggagaagctgcggaactctatggctacctttttggctccttttatctcgtaaatggagtgggggatgtcggggtcttgaatgtaggcttcgtaggctgcgtcataaagaatcaatgtgtcgttctccagtgcgtaattcacccatttcttcaattctgctttactgataaccgtaccggtggggttgttggggtaacatagatataaaatgtctattctgcggtcggggatagcgggaatgaaattgttttcactcaggcagggcagatagaccacgttgctccatcttccgttttccagcactcctgctcgtccgcacatgacgttagagtcgatatataccggataaatagggtctgtcacaccgatgctgttatcgtggcggaggatgtcccctatatttcccgtatcgcttttggcgccgtcactgacgaatatctcgccggattccaaatgtactccgcgtgaggcataatcgtttttcaagatggcgtcgattagaaaatcatatccttgctcgggaccgtatccacggaaggtttctttgcttgccagttcgtccaccgctttgtgcatggcttctatggatgcttggggcaatggttgtgtcacgtctccgatgcccagacggatgaggtctttttggggatgggaaactttgaatgcatttactttcttggcaatgtccgaaaacaggtaattgttgggcagttttaaaaaatgttcgtttactaatgccataattgctgttgttttatagtttgtctttactgatttcttattcctgttaaatttctatctcaccatcgaaaacttttactgcgggacctgtcatgtacacatgtccgtctgtttcgttccaatggacttgtaaatcaccaccatccattcttacccgtgattttcttccggccttgtggttcaggtatgcggctacggcagtggcacaagctcctgttccgcatgccatggtgatgcccgagcctctttcccagactctcatccttaaggaaccgtccggcaatacttcaacgaattctacatttgttcgttcgggaaaaagcggatgattctccagtttcggacctattgccggcaaatttacattttttatatcatctatgaaaattactaaatgtggatttcccatacaaacaaatgttcctttgtattcttttccatctactgtgattgtttttgccaacattttgccgtccggggtatttatttgtctggagttggtaagcaggggaagatccatgtctactgttacttcttctaccagcccgttctccgtatgcagttttaggatcttgattcctgagagcgtttccagcgtgatgatttccttttgagtcaatttgttgtcatatacatactttcctatacatctggaggcgttgccacacatcatagcttcagaaccatctgcattgaatatgcgcatactgaaatccgctttggttgattttccaatcaataccagcccgtcggaaccgatccccgtgtgacaagaactccatttgatggaagttctcacggggtctgctatggggtgtctcagggtgtttacgtatatatagtcattacctgctccctgcatcttcgtgaacttgattgttgttgccattttgtctataacttcttctgttattatttccttttgtcttattttggtgcaaatatatatctttttgatgttttataaacaatggtgctatctatattcttatttatttttattctaatgataaatagaaagctattttaggtgtttttctttcaaactgaaataaaagtctagttatattctttttaattgtaattcattaagtctgtactctgttatggaacatatagtttaggtaatattttgttggttattcagtgttgtataatcggtatcgtatataattaaggtggatgatcgatgtaacaaaatgataatatattatcgcattgctatattattttgttacctttgcatcctgttggataaaaaagagatttgtaatgcagaatattattgcgatagaaaatggtgtgacccgccatccgctgtaccggatgaaggaaccggtgaatatgacacttgccgccggagaacatatagctgttgtgggaagaaacggggcaggaaaaagtatattggtagatacgattacaggtcggtggccgttgttgatgaacgaagtgaaatatgatttctctccctctccttcgaagatggcatacgagaatataaagtatattgctttccgtgattcatacggagatgccgatggaaattactattatcagcaacggtggaatgctcatgatttggatgaaactccactggtacgtgatttgttgcccgaagcgaccgattcaggcctggaaaaggctttgtatgaactgtttggcatggagaggatgctggataaacatatcattctgctttccagtggtgagttacgtaagtttcaactgacaaagactttgctgagtaatccgcgtgtactgattatggataatccctttatcggactggatgcgaagacgagggacctgcttcatacattgttgggtgaactgactaaagtaacccatttgcaggtaatccttatcttgtctaagtccgatgatattcctgcttttatcactcatgttattcctgtggaagacagggtgtgtggtaaaaagatgactttgcaggaatatttggcggtccgtaaaccgataccggaacggatgctttccgaagaaaaggaggcacggattctgaatttgccttacggcggtgatttgtatcacaccgagcacgtagtcgatttgaacaaggtaagcatccgttatggcgagcgtaccattttgaaagatttggactggacagtgaaatgtggcgagaaatgggctttgagtggagagaacggttcaggaaagtctacgttgctgagtctggtctgtgcagataatccgcagagttatgcttgtgatattaccttgttcggcagaaaacgcggttccggagaaagtatttgggagataaagaagcatataggatatgtcagtcctgagatgcatcgcgcttatctgaagaaccttcctgccatagatattgtggcaagcgggctacatgattctgtggggttgtacaaacgtccgcgtcccgagcagatggcggcttgtgaatggtggatggatatttttggtattgcaaatttgaaagaccggaatttcttgcagttgtccagtggcgagcagcgtctggtgttgttggctcgtgcttttgtgaaggatcctgagttgcttattttggacgagcctttgcatgggttggacttgtacaaccgccggttggtgaaagatgtgatagaaactttctgccgtcgtaaggacaagaccatgattatggtgacacattatcaggaagagttgcccgcatgtataactaactctcttttcttgaagcggaattaaaagttctttttcaaaaggtacgttccgggcagacggaagacgacaggttaaacgatagtgccctgtcgctttccggacaagccggggtgttggactgagtacaaataattctactgttcgtttcataaatatagcattgaaattttttaaagaaaacgaatcatggaaaacacattaaaaaagcctatgacaggcattattcctcctttagtgactccgttactggataatgacaaactggatattgacggtttggaaagattgatagaacgactgataaaaggaggagtgcacggattatttatactgggtaccactggagaggcgcagagcatcagttaccggctccgccatgaaatgataaaggaaacttgccgtatcaatgccggaagacttccggttctggtttgtatttccgatacatcaattgtagaaagtattcatctggcacatgtgggggccgagtgtggtgcttcagccgtagtttccgctcccccttactattttgctccggggcagcctgaactggccgaattttatgaagaccttatccctcagttgccgttgcctatcttcttatataatatgccgtcgcatacaaaagtgaattttgctccggctacgatacagcgcattgcccgtaaccctcaggtagtgggattcaaggatagttcggccaatgccgtttatttccagtccgtgatgtatgtcatgaaggaccgaccggatttcgccatgctggtgggaccggaggaaattacggccgagtgtgtgttactgggtggacacggaggcatcaatggaggtgccaatatgttcccggaattgtatgtagacctgtataatgccgccttggcacgtgacatggaaacggtgagccgtcttcaacccctggtgatgcagataagcagcagtatttatactgtgggccagcatggttccagttatctgaagggattgaaatgcgcgttgtctttattgggcgtttgtgatgattttgttgcggctcctttccatcgcttcaatgctccggaacgcgagaagatacgcaaggcgttggaggcactccctttttgtccggagttgaaaccttaaatgctcggtctgtatgcatatcattgatataatcgtctttttgctgtttaccggcggagtcgtggccttcggttgttctttctttaagaagaaaggtacttccgaggagttcacttctgccggcagaagcttgcccggctgggtggtggggatgtccatctttgccacgtatgtcagcagtatcagttatttgggatatccgggaaaggctttttcgggagattggaatgcgtttgtattcagcctgtctatccctatagcttcttattttgcggctcgttacttcgtgcctttttaccgaagccaggacagtatatcagcttatagtttcctggaaaaccgcttcggcccttgggcccgtatatatacctcgtcctgttatctgcttacccagattgcacgtacaggctctattctgtatttgttggcattgcccatgaatgtattgctgggatggaatatccagaccatcattattgtgaccagtgtggctattgtactttattccatgctgggcggcatgaaagctgtcatttggacagaggccatacaggggattattctgattggcggtgcgctggtatgtatgttcatcttgctttttgacatgcccgaaggtccggcacagactttctccatcgctatggaagatggaaaattcagcttgggaagttttggaagcagtttaagtgagtccactttttgggtgtgcctgatttatggcgtatttaccaatttgcagaactatggtatagaccagagttatgtgcaacgttatcatacggcgaagaatgagaaggaggctaagttctcggccttgttcggaggatatttgtttattcccgtttcggctgtcttctttatgatagggaccgggctgtatgcgttctataaagtgcatccgggggtcttgcccgacggagtgggggcggattatgtctttccgttctttatagtcaatgagttgccggtggggttgacaggcctgctgattgcttctatctttgccgcaggtatgagtaccattgcgaccagtgtcactagttcgtctaccatcattctgacggattattaccagcgtttccgcaagcatgccggaaacagggaacggatgttggtgctgaaactctctagtgtgggagtaggagtggcaggaattctggtggcctttgcctttatgagtgtgcaaagtgcgctggatgcttggtgggcgttagcgtctattttcagcggaggcatgttgggactgtttctactggggtatatttcgaggaaggcacgtaattttgatgcggtactgggagtcgtttgtggggtaattctggtttgttggattgtgatatccccttttgtacatgctaatctggctatcgtattcggaacgttgctgatatttttggtgggattcctgagtgctaatttgtttaataagagaaggtgtaagtagaataacttaattttatgcattaggcgtgtcaaaacaaaaatgactgctcctgaaggttacagatagtaattataacccttaaaagggtcgtatcaagctctgtattgagtaatgatacgaccctttcttagtcttttaggatgctcaaatttcagattataagttcatatttccaaaaactgaatttggacacatccacttttatgtatttgtcggttacaatctgtaatctttagaatgttcatcttgtttttgattcattctccggtttttttgatcgtttcattgtccgcaccatcagataaatctttgcaactcattgaccctgtttaatgcggcattgaaatcttccaccagttctttcatcacttcatccaccgtctgtaatttatgtatgcaggatgcgacttgtcctatttccagttccccttcgaataaatctccttcaaagattcccttttttgcacgtccttttcctaacaaagtgcgtagttcatccgttgtcgcgccacggctttccgcttcttccacttgtttgaagaaatcatttttgaccagccggacgggagagagctgtttcaatgtcagttgggtatctccttcgttcagtcgcaggcatcggtctttgaatgtgaaatgagcggaactctcttcggttaatgcgaagcgcgtgcctatctgcaccccgtcggcccccaatgccatagcagctagtatactttctcccgatccgatacctccggcagccatcaacggcacagtggtaatctgtctgacggccggaataagacatagggtggtcgtttcctcccgtccgttatgtcctcctgcttcgaatccttcggctacgatggcgtctacgcctgcttcttcgcatttggcggcaaacttggtgcttgccactacatgggccacaatgatgccgtgctcatgcaggtgttctgtccaggtctttggatttccggcagaggtgaagacgattctcacaccctcttctattaccatattgataaggatgtctatttcgggatacattaacggaatgtttactccgaaaggcttgtctgtcgccgctttgcatttccgtatgtgctcgcgcaaggtttcgggatgcatagagcctgctcctatcagtcccagccctccggcattacttactgcggaggccagtctccaaccgctacaccataccattcctccctgtatgatgggatactttattccaaaaaggttgcaaattctgttcatatataataatttaataatttgcacattattcattatacaaaacaactaacttttattgaatgttttagggggaaagtagtgaaaaaaggaaaaattcttagaaattttaaggtttgtagaacagaaatggtctatctttgttctcggaattaaaattgtatatttataaacggataaaaaccatgttattacaactgctatttgtacttgtcgctattattgtaggtgcccgtttgggaggtatcggattgggagtgatgggaggtgtaggccttgccatattgacttttgtcttcggacttcagcctaccgctccccctattgatgtgatgttgatgattgtcgccgttatctctgccgcctcttgtatgcaggctgccggcggactggactatatggtgaagttggcggaacggctgttgcgccgtaacccctcgcaggtgactatcctgagcccgttggttacttatctgtttacttttgtcgcaggtacagggcatgtggcctactctgtgcttcctgtcatagccgaggtagctacggaaactaaaattcgtcctgagcgtcctttaggcattgccgttatcgcttcgcaacaggctattaccgccagccctatctctgccgctaccgtagcgttgctgggcctgctgacaggatttgacattactttgtttgatattctgaagatttccattcctgctacattaatcggtgtgctggttggtgctttcctttcaaaaaaggtcggcaaggagttgttggaagatcctgaatacctgcgccgtctggaagccggaatgattgatacaaaacatgtggaactgaacgatgtgaagaatatgtttcacgctcgcatctcggtgattatctttattgctgccacactgctgattgtattattcggctctatccctgctatgcgtcctgtgtttaacggtgcggctttggatatgccttctattattgagatcttgatgttgtgtgcggcagctattattcttatcatttcacgtacggatggaatcaaggctacacaaggcagcgtgtttcctgccggaatgcaggcggtaatcgctatttttggtattgcatggatgggggatacgttcatcaatggaaacattacagaactgacaggttctattgaagggattgtgcgtcaaatgccctggctgttcggtctggcattgtttgtcatgtctattttactttatagccaggctgctacggtgcgtgctattgtaccgttaggaatagcactgggtatttctccgatgatgctgattgctttgttccctgccgtcaacggatatttctttatccctaattatcctacggtggtggcagccatcaactttgaccgtacaggaacaacgggtattggaaaatggattctgaaccattcgtttatgatgcccggaatggtggctacccttgtttctattgtggtaggcctgctgctgatacaggtattctagaaaggaaagggataggtgcggtcaggcttgaagatgagtgatctttcatctgtaacatgagtaatcttctgcctgtaacatttataatgattcgatgtgcacatatatatcatcggcgcatcttcttcctctgtgtgtgaacaaaatttccaaataattattatagtaataaaacctaaacttgaaaagattatgaacggattaagaaaactcagccttatggcggcaatgctggtatgtaccacattggctgctgtcgcccaaaagcctaatatccatatattggctacaggagggactattgccggaacaggcgcttcggctactaaaacaaattatactgccggacaggtggctatcagcacattgctggaagcggttcccgaagtgaacaaaatagccaatgtgaccggggaacagattgtaaaaatcggctctcaggacatgaatgatgccgtatggctgacgttggccaagcgtatcaacgagcttttcagccgtggagatgtggacggtatcgtgattacccacgggactgacacgatggaagaaaccgcctttttcctgaacttgactgtgaagagtgacaagcctgttgtattggtaggagccatgcgcccctctacggccatgagtgcggacggaccgctgaacttgtataatgcagtagtcactgccgccgccagggaatcacagggaaaaggtgtcgtaattgccatgaacggtttgattttgggagctcacggagccatgaagaccaatacggtggatgtacagactttccagtcccctaactccggtgcgttgggatatgtattgaatggtaaggttttctataatatggaatctttgaaacgccataccaccggttccgattttgatgtaacccaccttgacaagctgccgaaagtaggtatcgtttacagttattccaatgtagaagctgatatcatgactcctttcttgaataatgggtatcagggtattgttcatgccggtgtggggaatggcaacattcatcagaatttgtttccgatgttggaaaaggcccgtcaacaaggtattttggtagtgcgttccagccgtgttcctaccggaccgactacattggatgctgaggtggatgataataaataccaatttgtggcctcacaggagttgaaccctcagaaggcacgtgtgttgttgatgctggcgttgactaagacaaaagactggaagaaaattcaggaatacttcaacgtatactagtccatccggcactttttctttttatctctttttcttttgcgcgcataaaagaaaaaagagaatacattacaacctaaaactttgacttatgaaaagaataatgttagtatgcctgacagcccttgctgtctcaggcacttaccctttatatgcccaatcttccggaagtgatttcatggccggtgacaaaagcctgtttgaagaagtcaccggtatcaagaagaaaacggacaagttcaatctctatcttaatatgcacggtgatttcaatatgaaatggaacgactccggatttgatcggggcgcattcgaaatgaagcaactccgtatcgagatgaagggagatatcaatgactggttgagctatcgttaccgtcagcgtctgaatcggggtaacgatggttccggcaatatagataatgtacctaccagcatagattgggcgggagtaggcatcaaattaaataagttctcattttttgccggaaagcaatgtgcatcgtatggtggtatagaatttgatttgaatccgattgatatttacgaatatagtgacatgatagagcacatgagtaacttcatgaccggtttgaatgtggcatacaactataatccttatcagcagatacaatttcaggtattgaacagcctgaacgggccgtccgaggagatgtacggggatttggaacgtaccaaactgccgttggtttataccttgaactggaatggtaattttctggatgttttcaaaacccgttggtctgcctctgtcatgaacgaaacgaaaggcgagaagatgtattattatgctttgggtaatgaatttaatttcagccctaaatggcacgcctattttgactggatgtattctcatgaaggggtagaccgtaaagggattataactagtatagtaggaactgataatcaggcacacaatgcttttaatgccgaatatatgtcctatgtgttgcatgtgaattatcgttttgccccgaagtggaacttgtttgcaaaaggaatgtatgaaacggcttccgtttataaggcaagcgatgaagtggaaaaaggtaaatatcgcacggcatggggatatgcaggaggaatagaattttatccgatggagagcaatctgcacttcttcctggcatacgtggggcgttcctataaatataccgatcgtgcgaaggcattgggtgaggacaatttcagtacccatcgtgtgtcagtgggattcatttggcagatgcctgtattctagctcatgttttccttttttgtttgttgttctgcattgcgttacctcctcttggagatagcgtaatggcaggatgaagacgatggaagggcagaaagaatatgtttgtttttgtttgggagcgatccatttattcttgagccagactttctaccgatttgatgaaagcttcggcacgtggtctgagataatctaccaatgcggcatcgcaataggcaaagtcttcgtagtctccactgtgccgtttgtcaaacaagttgctgaatgtgctgccatgttccagactcagtactcctgtgcgcacaaagtgataggacaacattgtttttactccattgtgggtgcctgcctcgattcccttagctattaacaaaccggtggctgcataaaagcaggcataataaaggcggttgatggcggcgttaaaataatttcccacacgcatatagtcagcttcttccaaagtcttatacgctcgttcaaaacggtattgaatcaaggcaacgcggtgctcgggggatagttcctgcttcataacactatcccttcattcattacgttcagcgaaaatggagtctgaaagggacggttctcccataatctgcgcagcataatcattgggctgataataactcccgattttacttccagttcataaagcggacggataatttcctgttcgtattctggagtaagctgtggctcatctacaagaataagcagatcgatatcactgtctgggcgagcctctccgcgagcttccgatccataaagtatgatttgggcatttggtgctactttgtggaggatactgcgtatcatatctacaatttcggttcttcgcatgatttttctcctttctctattttatagtaacaaagataatgaaaaaatgtcaacttgttactgccctgtttctaaaaatatctttttctttctggccttatttagttcgataatgctttttctattgtatagaccggaggtctttcttcccgaaaaacttatcaataatcaatgcgatagccccatcgcccgtcacattgcaagcagtgccgaaactatccatggcaatgtaaagtgctatcatcaaagcctgttcactttctccgaatcccagcatggaagccaggatccccaatgcagccatgatggctcctcccggtactccaggtgcggctaccattgtaattcccagcataaagataaatcctgcaaacatggggaaatcaaaaggcattccttgcataatcatcagtgccagtgcgcaagcgacaatcttcagcgtgcttcccgacagatgaattgtggcgcatagcggaatgacaaatccggctatatcctccgtaaccccattcttgatggtctgccgcaaagtcaccggaatggtggccgccgatgactgtgtgcccaatgctgtgaaataggcaggcatcatctttcccaatagtttgaacgggttccggtgcacaaacagcgctgcaatggtatattgaaaaaccagcaggaagatgtgaagcaggaaaattactccgataattttaatgaataccatcagaatgttatatacctgtccggaatgagtcatattcaggaatataccgaatatatagataggcagcaggggcagaatcaccgtctggatggtcttgactatgatttctttgaaatcgttacatacgtttttcagcgctgtactatccagatgtgcgatgcccagacctagtgtgaaggccaggatcaaggaagtcatcacattcatcaccggaggaatgcctacggtgaagaacggagaaatgtcatgcgcttcactgatttgttctatcggcgctcccggagcaatcatggaagggaataaagtcactccggtgaaataagacaggaatccggagaacaaagtggcgccgtatgccaccaacgttgtgattaccagcatctttcccgcctccttgccgatatcggcaatggcgggagtgaccagcccgagaataatcaacggaatgatgaaacccaggaactcgctgaagatcccgttgaaagtcacaaatactctcaccagttcgccgggaagaacgtttccgaatcctatacccaatgcgatggcgatgataatccgggctaataagccgatttttaacctcttcatgataatgtgctattgttcaaattgcaaagatagaattattgaacaaattacctattaaattgttaaatataaaaagaacaatttatggaaaaggcagatataggattaatcggattaggcgtgatggggcagaaccttgctctgaatctcgctgacaagggatggaaggtcgtagtatggaaccgtaccgttcccggaaaagaagaaaatgtagtagataactttatagcaaaccgtgccaaaggaaaaggtatcataggcagtaatgaactgacggattttgtcgaagcgctgaaagctccgcgtgtcatcctcttgatggtacaggcaggtccggctgtcgatgaactgatgggtaagctgcttcctttactggataagggcgatatcctcattgatggagggaactcttattatgaagatacggaacgtcgtgtgaaggaactttatgataaaggaatgtactttgtaggttgcggtatctcaggaggtgaggagggtgctctgcatggagcgtccatcatgcctggtggtgcgcaagaggcatggccggtcattcagccgatgctgaaaagtattgcggcaaaagccgaggacggcactccgtgttgcgaatgggtggggcccggtggggcaggccactatgtgaagatggtgcacaatggcatagaatatggggatatgcagttgatagctgaaacttatttcgccatgaagcatctgctggcattgaagaacgaacagatggcggatatttttgaacaatggaacaaaggacgcctgcacagttacctgatagagattacttcagccattctgcgtcataaagaacaaggaggcggttatttgctcgacaacattctggatgctgccggacaaaaaggaacgggtcgttggagtgtcattaactctctgcaactcaatacgccgctggacgtgattgccgaggctgtttttgcccgtaatctgtcggcggagaagaacttgcgtgtgctgatgtcccagcattatatgcatgtggagaatcatccggtatataattatcaggatacggtggccggattggagagcaccttgtatgccgcccgtctgataggttatgcgcaagggtttgctctgatgcgcactgccagtgagcaatatggctggaaattggatctttccaccatcgccctgttgtggcgtgccggatgcattatccgttccgctttcttgaacgacattgccgaggcctatcgccgtgcgccgggattgtcgcatctgttactggacgagcatttcggacgggaagtaacggaagccctgcccgcgtggaagaaatacatcggtgtcatgttgaaagaaggattgcccgtacctgtactttccgcagcgttgaattattttctgggtttgaccaccaaccattccccggccaatatgatccaggcgatgcgtgattatttcggagctcataccttcgagcgtgtggacagtccacggggggaatttttccacgaacattgggaagacaactattgatacgtcgcaacacaaagcattatacattcatttttaaaagaaagaatcatgagtttaccacatagtttatttttggtcatcttcggtgcatccggtgatttaacccggcgcaaactgatgcctgccctgataaagatacataacgggaaacgcttccccgagcattttgccattatcggctgtgcccgtactgcatacacggacgaaacctatcgtgcttatctgaaagaagaactgataaagtccggttctcttacaaaagaagagatggaaacattggacgattttctctctactgtccattatcagtccatggacccggcggacgaaaccacttattctctgctgaatgaccgtctgaaggagctttcacctcaatatgagaataatgggaattatttattctacctggccactccgccattgctttatgaactgattccgaaatatctgcatgatgcgggcttgctgaaaaagcccggattaaagcgtatcattgtcgagaagccttttggatacgaccttgcttctgctcagaaactgaataagatctatgccgcttattttaaagaagaggatatttaccgtatcgatcatttcctaggcaaggaaacggtacagaatattatggtgacccgttttggaagtaccatttacgaaccgatatggaaccgtaactatatagatcatgtggaaatcactgcggtggaaaatatgggtataggtactcgcggagggtattatgacggagcgggagctctgcgtgatatggtacagaaccacctgatgcagttgcttgccattactgccatggaaccgcctgccaagtttgacaagaatggttttcgtaacgaggtgatcaaagtctatcagtcccttcgtccgctgactgatgagtatatccgtgataacgttgtccgcggacaatatattgccggtgacgaccgtatcggttatcgtgaagaaaagaatgttcatcctgattcccgtacggatacctacgtggcgatgtgcctgtatgtggacaactggcgttggcagggagtacctttttatatccgtaccggcaagcagatgcctaccaaggtgaccgaaattgtgattcatttcaaaccggcccctatgcagatgtttcaaatgaaggagggcttgtataaaggtgaggaactgattatccgtattcagcccgacgagggaattcttcagcgcatagccatgaaagaacctggtgccggtttctatatgggaaccatggagatggatttcagctatgaccagcacgatcaggaaacgggggatgcgtacgtacgcctgttggaagacagtctggcgggtgatcctacactttttacccgttccgatgccgtggacgagagctggacttactttgacaagattctggattactggaagaagcatcccgaaactcctctttatgggtatcctgcaggaacatggggaccgaaagaagcggatgtgttgatcaaccgcagtcatgccgaatggacaaacccgtgcaagaatctgacacattccaatttatactgtaaattgtaagtcgtcatctgtgaatagtaaatttaaacagcaaactttaagtgaaaaatagtgaataagatgattgaccataacttgtatgcgtcgcctgtacaagcgtcgcaagccttgataactcatatattggaagcgatggataaagagcctgaacggccttttaccattgctctttccggaggaactactcctgccacactttttgaggtttgggagcgtgaatatgccgcatataccccttggccccgtatttatttctattgggtggacgagcgttgcgtgccacctggcgatgatcagagcaactttggcctggcccatcgtctgctgcttggcaaggtaggtattcctgccagtcattactaccgtattgtgggtgagggcgctcccgaagaagaagccaaacagtattcttccatagtcaagaccaccgttccgaccatggacggtgtgcctgtttttgattttgtattattagggataggagaggacgggcatacatcatccattttccccgatcgtcaggaacttcttaccgccggggaaccgtatgaggtgtccgtcaatccttataataaaacagtgcgtatatgcatgacgggacgtcctttgatagaagcccggcatacctgttttctggtgacgggcgagaacaaatgcagtattctgaaagaaatccttgataaaaataaggaagaggtctatccggcatcctatatctggcatcatgcacgtaatccgcaactgtatgcatcacttgtatcataatatttcttttagatgaagagtttaaacgaaaataactttctagatgggaaatgaatcaactatggatgctgtgtgtcctatagatataaaaaaaggagcaacgccttgctccaacctttgttaaccttaaatctaatactatgaaaaacacaatgcaaaggtacggatttttcggaaatttgcaagatattctcttcattttataggttgaaacaatgttatttaacatagaaaggcatcctgtttacagctattggcaaaacaggatgccttcactataatccattaagactctttaataagcgtgtccgtcttgttccagttcctttgcggtaatgggcttgcggtctatggcacgccaagcataaatgatataggccagaacgaaaggtaccagaatggaaacgtatgccatggtgcgtagggtaaactcgctggagcaactgttggccaaagtcagcgaactttgtaaatcggctgtagacgggtagtaagctgtattattatatcctgcgcaaagtaataaagctaatacagtgagcacgacaccgggaccggcaaaccagataccattggtggcagtcttgctgaatactgcttttccaatgccccaaagaaccccgaccactccgatgaggaacaataccagcaataggggcatatccatcagattgaggaaatacttgtaaggttccatataaatttcctttgtttcgggatttacagcgaaaccgtcggctaataaagtgcggataacgaaagccagaaacaggataaggaaaggaatcgcatcggttataagctgacggcggcaacggggaatcaagtctttatcccggatgttattgataaaataaagattacccaaaagacgggccaggaagaatacggcgaatcccaagaccagattccaaggattagtcagcgcatccagtccgtgccatccgttggcccaactgctgatgacaggcatcagttcattgcccatgttgcctttattaaccaggaaattggagccggtaaagaaagtagccacggctcctcccagcaacaacggacccacaatgccatttataaccagaaaccattggtaagtgcgtttgcccagcagattgcccagcttggattggaactcgtatgagacagcctgcaatacgaaactgaaaagaataatcatccacaaccagtaagcaccgccgaagctggtactgtagaacagtgggaaagaagcgaagaaagcgcccccgaaagtaactaaagtggtaaaagtaaactcccacttgcgtcctgtggagtttaccagcaaggcacgttcttcgtcattgcgtcccagcgtgaacaataaggaattaccaccctgtacaaagagcaggaacaccaacagggctcccagtaacgataccaggaaccaccaataattttgtaaaaatatatagtccataatgttctaatttaaaaatggagaattgaatattgaaagatagaactgaagaaaccttagttctcaattcttgattccctccggccctttcttgatagccttcagcataatacctatttctgcaaagagcagaacggtgaacaacagaaggaaaataaagaaagtaagttgtacagaccctgtctgtaacttggagatggctgctcctacgggcagcatatcctgtatagcccatggctggcgccctacctcggctaccacccagcctgcctgactaccgatgtaggctagcggaatagtccacaaagccacccgttgcagccatcgcatatcggccagtttctcttttttcgatgcaatcaatacgatgataaagaacaggatgaaataacctcccagtcccaccatgatccggaatgaccagaaagtaagttccacattaggaaccagatgggtggggtccttgatatatccgtaaccaaaatatttcacgttttcgtccaatgtcttgcgagctacggcggcgcttgcttcgtcacctgccttatgcgctttgcggaatgcatccagagcggcgatggcaatctgtccgcgtttaattttctcttcggccgataaagccgttgtaccgtcgggcatctgataaccaccttccagcagattgttgatacccggtacatagccgtctatgtcgtgagtggcaagaatggaaagcattttggggattttcaaatctcctacaatggtgaagggcactccgtttccaccatcgtgtaatccttcggcggcggccattttcataggctgcactttggctacctgtactcccgaaatatcacccgtccatgcagtgacgagggaagcgaacagacctacggcggcggcaactttaatgctgctcagagcgaactccttctgacggttgcgcagtaaataccaacaacttattcctactacaaaaacggctcccagtatccagctgcttaacactgtgtggaagaacttggcgacagccatgggagagagggcgacagctgcaaagtccaccatttcatttcttactgtttcgggattgaaagccatccctacaggatattgcatccaggcattggcgaccagaatccaccaggcggagatcgttgctcccagtccggtgagccaggtggatgccaggtggaaacgcttgctcactttgttccagccgaagaacataacggcaatgaaagtggcttccataaaaaatgccaggattccttcgatggccagtggggctccgaaaatatctcccacaaaccaggaatagttactccagttggttccgaactcaaattccagaatcagaccggtggcgacacctacggcgaaattgattccaaacagtttcatccagaacttggctgtgttcttccagaattccttacctgttgtcacataaaaggtctccatgagccccattatcacagccaatcccaaagtgagaggcacgaaaagccagtgatacatggccgtcaaagcaaactgcgctcttgaccagtcaattaacgaagtgtcaatgttttcaaacataactttctgatttatttaaatgtttatggatttgcccgttctattaactcttcacctacatactgttgtttctcttccgttgtcttgccgccaaggaaggaggggaaaaagaaaagtttcagaataaagaacatgatgaataatttgataagaataatcgcccagagggtacgtcccaaggtcatctcgcgaaagccgtcgcgatagaatatccagatgcgtgttaacaaagaatcattcataaatttatcttaaagttgtaataattacaaagaaaaacactttatcggtaaaaagcaagtttttgtccatagaaatcttccgcaaatctatatttattgctaaaaatatcacggtcctctacttttgtatcaacaaattaaatagtaaaaaggatgagacaacgagtagtatatttcgcaatgattttggccgcggttacttcggtttccgcccaagaagccaaaaaatggacgctggacgactgcattgactatgcattggagaaaaatatccaattgcagcaggataaaatctcattggaagagagctcggtagacgtgaaaaccgccaaagccgccctctttcccagtctgtcgttcagcacaggacagaatgtgacgaaccgtccgtatcaggaaaccagtaacacggtaagcggaacggagatcatcagtagtgatagtaaaaccacttataatggaaactatggtctgaacgcgcagtggaccttgtggaacggtaacaaacgcttgaatacgatcaagcagaggaggactagtcagcagatagcagggcttgccgtaaccgaaacggagaactctctgcaagagcagattgcacaaatattcatccagatactttatgccgacgagtcggtgaagattaaccggaataccttacaggtgagccaggccacatacgacaggggcaaagagctctttcaggaagggagtatttcgaaggccgatttggcgcagctggaatcacaggttagcagtgacaaatatcagttggtgacctctgaaagttccttgcgcgactataaattgcagttgaagcagttgttggaactggacggtacggaagaaatggatttggttcttcccgaactggccgatgagcatgtcttgcaaccgctgcctgctcaggaggatgtttatcagcaggctttggcatcacgtccggaaatccaaagcagcaagttgagcatcgagaattccaaactggatatatcagtggctaaagccggctatctccctaccatcagtctgagtgcatctacgggaagtatgacaaacagtgccagtgacaatagctggagcaaacaaatgaagtatggctggaacaatatgataggggtgaacataaacatcccgatttttgataaccgccagaataaaagtgccgtacagaaggcacgcttgcaatatgacagtagtctgctcgatttgataaacaagcaaaaggaactctataagaatatagaaagtctgtggctggacgctactaacgctcaagagcaatatgcggcggccgaaagcaagctgaaaagtagccaggccagttacgagatggtcagcgagcagttcaatttgggaatgaagaataccgtagagttgcttaccgagaaaaataacctgctcagtgcacagcagcaacgtatccaggccaaatatatggctatcctggaccggactttactagacttctatgcaggtcaggatataaaattataatcataacgctatacatattatattatggaaaagaagaaaattatcctcactacagcggtagccgtagtggtcgtggcaggcggtttctggatgcttggcggaccggaggggaaaagtacggtcgatttcgcaacggaagctgtaacgaaaggcaatgtcagcaatttcatcactgctaccggaactatagagccggtgacagaggtggaagtgggtacgcaggtatccggtatcattgataagatttatgtggattacaactccgtggtaaagaaaggagaattgatagccgagatggataaagtgacattgcaaagtgaacttcagtcggcaaaggccacctatgacggcaataaggcagagtacgactatcagaagaaattatacgaccgtaaccgtaagctgcacgagaagcaattaatcagcgatacggattatgaagaaacggtttataatttccaacgtgcccaaagtgcattggagcaaagcaaggcggctctggcaaaggctgagcgtaacctgtcatacgcaaccatcacctcgcccattgatggagtggtgaccagccgtgatgtggaagaaggacagaccgtagcatccggtttcgagactccgacactgttcaccatcgctgccgacttgaccaagatgcaggtggtggccgatgtggatgaagccgatattgccggggtggaggaaggagcccgtgtaacctttaccgtggatgcttatcccgacgatgtgttcgaaggagtagtcagacagattcgtttgggaagcacgaacagcacgagcagcagctcttcaaccaccaccagcaccactgtagttacttatgaggtagtgataacagctgataatcccgatttgaaactgaaaccgcgtcttaccgccaacgctaccatttatacattgaccaaggataatgtgttgaccgttcccaacaaggctttgcgctttactcccaacaaggacatagtgggaggccgtaagataaacgattgccagagcagtcataaagtgtggacactggataacaatacctttaccgcccatcctgtaaaaataggtattactgatggcagcaagacagagattgtgagtggcatcactgaaaatacaccggtagtgacagaaacggtagtgaaaggtgctatgcctggaatggaagaaccgtctgccggagaaggtgaaagaagtccgttcatgccaggccctccgggaagcaataagaaaaagaacaagtaataaaaggtaatgcttccgtttacattgaaagaataaatcacatgaaaaagataatcgaattacaaaatataaaacggaacttccaggtaggcgatgaaaccgtccacgccctgcgtggcatctcttttaccatctacgagggagagtttgttacgatcatgggtacttccggttccggcaagtccactctgctgaatactttgggatgccttgatacccctaccagtggtgaatacctgttggatggtgtgtccgtgcgtaccatgagcaaacctcagagggctgtgttgcgcaatcgtaaaataggtttcgtatttcagaactataatctgttgcctaagacgactgccgtagagaatgtggagttgcccttgatgtataactcgtccgtatcggcttccgaaagacggaaacgtgccattgaatcactgatagctgtgggactgggtgaccgtctggaacataaatccaatcagatgtccggcggacagatgcaacgtgtggccattgcccgtgccttggtgaataatcctgccgttattttagctgatgaagcgaccggtaatctggatacccgtacctctttcgagattctggtgcttttccaaaagttacacgccgaaggccgtacgcttatttttgtcactcacaatcccgaaatagcccagtatagcagccgtaatatccgcttgcgtgacgggcatgtagtggaagacaccgtcaatcctcagatcctttcggccgctgccgcactggctgccttgcccaagaatgacgaggactaaccataaaaaagaatcattatgaacggaacaaatctatttaaaatagctctccgggcccttgccaacaacaagctccgcgctttcctcaccatgttggggatcatcatcggtgtggcatcagtcattgctatgcttgccatcggtcagggctcgaaaaagagcatccagcaacaaatctcggagatggggtcaaacatgattatgattcatccgggagcagagatgcgtggaggggtccgccaagacccttcggccatgcagacactgaaactggaaaattatgaaaagttgagcgaagaatgtacttatctctccggcatcagtcccaacgtttcttcttcggggcaacttgttgcgggagccaacaactacccgtcttcggtgagtggtgtaagtatggattatcttaccatacgccagctcaccgtggaacagggggagatgtttaccgagaatgatatccgtacggcagccaaggtctgtgtcatcggcaagaccattgtcgataatctttttcccgacggatcggatccgatagggaaagtgattcgttgtaaccaaattcctttccgggtaatcggtgtgctgaaatcaaaagggtataactcgatgggcatggatcaggacgatgtggtactggctccttatagcacggtgatgaaacgactgctggcacagacttacctaagtggaatttttgcttcggctctgacagaagaaatgaccgaggaagcagtagatgagataacgaccatcctgcgccgtgaacataagctgaaagaaacggacgctgacgactttaccatccgcacccagcaggaactgagcagtatgctcaacaccacaacggacctgatgaccactttgctggcttgtattgccggcatctctctggtagtcggaggtattggtatcatgaatatcatgtatgtgtctgtaacagaacgtacccgtgaaatcggtctgcgcatgtcggtcggggcacgaggggtcgatattctgagccagtttttgatagaggctatcctgatcagtatcacgggtggcttgataggagtgattataggttgcggagccagctttatgattaaggcaatagcgcattggcctgtgtttatccaaccttggagcgtgttgctctcctttctggtatgtaccgttactggtgtgttcttcggatggtatccggcaaagaaggccgcagaccttgacccgatagacgctttgcgttatgaataagggcggaaaaggttttctgtatggagagaaatgccggaacatacgttcgggtttgcctccccacggttgtggagagcgctcctcataactatgggttgcgctccccataactgtgaagagcgcggcccatagctgtgggaagccaaacttgaacgtatgaataacagaataagagccgtagaaatcttatttctaacctaatctttcttatctttgcctgtatgaaacaattattttcacagcgacgttttttggaactgagcatccatatcgtcagttggctgctcatatttggcttcccgttggtttttatggaccggggaagcggctttaacctggcccaattcttgcggcacagttgtgttcctctgtgctatttcgttatcttctatgtcaattacttgtggctggttccccgctatatgttcacggatgaaatgcgtaagtatattctgagcaatgccgtgctgatactctgcctgagtgtgcttcttcatgtatttctggaaagtataagtacgcctccgcctcctgaatttgcgcgtcatattccacctcgatggatattctatgcgcgggatatggggatgatgatattcgtcgccgggttgggtgcggccattcgtaccagtctgcgttggcgtcaggcggaagagcgtttgatagaagctgagaggcaaaagacggaagcggagctgaaaaacttgaagaaccagctaaaccctcattttctgctcaatacattaaataatatttatgccttgattgcttttaacagtgacaaggcgcaggaggcggtacaggaactgagcaaattgttacggcatgtgctctatgacaatcagcagacttttgtcccacttgaaaaagaattggactttatccgtaattatgtagccttgatgcgtatccgtctgccacagcaggtagaagtaagtgtgaatttggaggcagactccggaggtgcgttgcagatcgctccccttattttcatatcactgatagaaaatgcgttcaagcatggcatcagccccacggtagacagttttatcagtatttctatcttcgggcatacggatggtacggtgagatgtgagatccttaacagcaatcatccgaagtctgggcaagataaaagtggaagcggggtggggctggaacaggtaagcaaacggttggaactgatttatccgggacattacgaatggataaaagggatcagtgagaacggacaggtatattcttctatattaactatacagactaaaagcttatgatactgaattgtgctattgtagatgatgagccgctggctttggaattgctgagaagctatgtggaaaaaacttcttttctccggttggtagggaggtattccagcgcggtgcaagctatgacagaaattcctctccgcgaggaggtacatgtcttgtttcttgatattcaaatgcccgagttgaacggtttggagttttcacgcatggtcagtcccgaaacaaggattatttttactactgcattcggacagtatgccttggatagttataaagtcaatgccttggactatttgttgaaacctatcagctatgtcgattttttgcaatcggtgaataaagcggtgcaatggtatgaactgaaacagaaggcagataatggtgttgatgctgatgaggcggatgattgtatatatgtaaaaagtgattataaattgctccgaattgctttagaccgaatactatatatagaagggttgaaggattatattaaaatacatgtggaggatgagccgaaagctatcttgtcacttgtcagtatgaaagctatggaagagaagcttccttctagtcgtttcattcgcgtacatcgctcgtttatagtacaaaagagtaaaatcaaggtggttgaccgggggcggattgttttcggtaaggagtatattccgatttccgatagttataaacaggagttacagatgtacttaaatagtcattctgtttgaaaaagttgatatttgaacgataaaagttgatattttgtcgatatccttttgctaaaaagaaataatctttttatatttgcggcatagacaagggaagttgtgaaacttcttaatagaatagtttagttaagtctagtttagtttttgtgttgtaagtgctcccatcgtaagcgaacgaatgggagcacgttttttagatacctgtatgggagaagtgttctgtttctgcaacaaatccagagattggtttgttaatcatagtataaatagaaataattctccttatgaaaaaaataatccccatactgattgccatactcatctgttttggtgtaggctgtactgcttcttattttcagtcggaggccatactcaactggtatcctacattggacaaaccttctcttacaccacctgatatggcttttcccattgcttggagccttatctatctgtgcatgggaatttctatcgggttgatttggcatatgtggacaataagacgacaaatgattatcagattattcgggttccagctcttgtttaattttacatggagcattttcttcttttatctccggagtccgttgctaggttttgcaaacattttggtgctggatgtgcttgttgtttattatatgatagaaagttatccggtgaagaaatcttcggcatatctttttgttccttatcttttgtggttgattcttgccacttatcttaacggctatatattaatgtataattagaagactgtcattggctagttgaacgggaattatggggtacaagaaaaaatacctatttatagtgattgataaccctagtgattttccgtaactttgcggccataaagagaaacaaaaaacataactatgtataaaacaagtaaatatactccgacggacaaaatgagttatcttatctgtgataactatacattgctacaggtaatgagccgttttgatctttcgttggggtttggagacaagactgtacaggaggtgtgccgtgaaaatggagtggattgtcgtactttccttgcggtggtgaacttcatgattgaagatagcgaccggatggaggacgatgtgaaggacatttctatgccttcattgatgaattatttaaaacaggcacatcattatttccttgatttctgtctgcctactatacgtcgtaaactgatagaagctatagattgttccacggaaaatgaggttgcatttctcattttgaaattttttgatcagtatgccggagaagtgcgtaaacacatggattatgaagatatgaatgtgtttacctacgtagagaatctgatggcaggacgagaaacgggaggattccgtatctcacagtttgcccgcaggcatgatcagatagatgcgacactgactgagctaaaaaacatcattattaaatattatccggcaaaaggaaataaccatttgttgaacgccgtattattcgacatattcagttgtgaacaagatttggcatcccattgccgcgtagaggactacttgtttgtgcctgctgtacttaggctagaaaaggaggggaaatgaaacggacagaacctgtgcacgttgcggtggccgaaacgtcagtcattgtgcgtagcggacttgtggctgtgctgaagcgcatgcctgatcttacaatacagccggtggaaataacttctcttgaaggactgcagaattgtatgcagggacatcagccggatattctaattataaatcctactttcggaggatggtttaacgtggacgagtttaaatcgaactatccacaggcatctaccaagtgcgtttctttgctgtgttcagtcacagatacaaatttgttgaagggttacgatgagagtatagcgctgtatgatgacatcgaagttttaaataaaaagttagtagatctgatgaatcttggtgtggatgagacggatggcgaacaggaaacgttgagccagcgtgagaaagaaattatttgttgcgtggtacgtggaatgacaaataaggaaacggcggaaaaactgttcctctccattcatacggtgataactcaccgccggaatattgcgcgcaagctacagatacattcacctgccggattgactatttacgctatcgtaaataaactggttgaactaagcgaggtgaagatgaacttataatacctataaatagtgagtggaataagatagaatacctaaatgaagtgattgtggatgtggcctctaacctctatctttgcactataagttagtcatatagaaattacgtaaaccacaaagttagttattagttaaaagcactccctgcgaagtgattcgcggggagtgcttttttattagtaaggcttttacccacaatattatgtttttttacctattccgcttcattattcgttagaaatctcgttgttttcttaacaaatatcctctaactttgttatttagtataggacacatattaactaatgacaatgaaagtaggtttatttattccttgttatatcaatgcggtatatccgcaggtggggatagcctcgtacaagctgctgaaaagtctgggagtggacgtggattatcctctcaaccagacttgttgcggtcaaccgatggcgaatgcaggtttcgagaataaagcggtagatttagcccgccattttgacgaacagtttaagaattacgattatatagtaggtccttcggccagttgcgtcgtttttgtgcgtgataactacagtcgtttgttgaaagaagacaaacatcggtgcgccagcgaaggtaagatatatgatatctgtgagtttattcatgatatcgtcagaccttcttcgttgaaagccaagtttccacataaagtgagtctgcaaaacagttgtcatggagtgagattgatgaaactttcttctgccagcgaacttaatattccttatttcagcaaactgcgtgatttgctctctttggtagaaggagtggaagttgtggaaccggaacgtaaagacgaatgttgcggtttcggcggtatgtttgccgtagaggaagatgcggtttccgtgcagatggggcatgacaaggtgatgcgtcatatcgctaccggtgctgaatacattgtgggggccgacagttcgtgcctgatgcatcagaatggcatcattgcccgtgacaaacttcctatcaagacattgcacattgttgaaatcttagcggcaggattatgagtacgaaacattcaaaagcggctgcggagtttctgaaaaacaagaaacaggccgcatggcatgacgaaacactttggctggttagggcaaagcgtgacagactgagtaaagaagttcccgaatgggaggaattgcgtaatatggcatgtgctactaaactatatagtaacagccatttggatgaattattggtggagtttgaaaacaatgcgcgtgctaatggagcccatgtctattgggcaaaggacgcggatgagtattgtaatattgtctacaatattctgaaccagcacggagtgaagcattttataaaaagcaaatccatgttggccgaggaatgcgaactcaacccttttttggaaaacaaaggaattgaagtggtagaaagtgacttgggagagcgtatcttgcaattgatgcatctgaagccaagccatattgtattacccgctattcatatcaaacgtgaacaggtaggtgagcttttcgagcgagagatgggtacggagaaaggaaattttgaccctacttaccttacacatgcagcccggaagaatctccgtcagaaatttattcatgctgaggcggctatgacaggtgctaactttgctgtagcttctactggtgagattgtggtatgtaccaatgaaggaaatgcggatatgggtacttcacagcctaaattacagattgcagcttttggtatggaaaaaattgtgccggaccgtgaatctttaggagtgttcacccgcttgttggcccgttcggctacaggacaacccattactacatatacttctcattaccgaaagcctagagagggtggggagcttcacattattattgtagataacggacgtagtaagatattggccgaccaaaagcatatcaaaactttgaattgtatccgttgtggagcctgtatgaatacatgtcctgtatatagacgtagtggggggtactcttatacttattttattcccggccctatcgggattaacctgggaatgttgaaggcgccgttgcattattatgacaatgtgtcggcttgttctttgtgttattcctgttcgtttgtgtgtccggctaaggtggatttggcggagcagatctatctgtggcgtcaggatttggataaattgggtaaggcagaccggatgaaaagggtaatgtccggtggcatggaattcatgatgaatcgccctttgatattcaatatggcattaaaatgggcgccattggtaaacggaatgccacgttttcttatctataacggattgaatgactggggaaaagggcgtgagatgccgaaatttgctaaggagagtttcaatgaaatgtggaagaaaggtaaagtgaagtaattatgagcagcagagaagatatattgcagagcatccggcgtgctacacatgtaaaatatgagaaaccggatttaaagccattggaagatatggcattaacttatcccagtaaggtggaacagttttatctcatcatgaagcaggtaggaggggaagccattcttttggagaaagaggaggacgtgaatgatttcattaaaaaggcttatcctggagccaaacgcatcgcttctaatctgaagactattacatgtgcgacatttaatcccgatgatgtggaagaccctgcagaactgaatgggacggatttggccgttatagatggaaagattggggttgcggagaatggtgcggtatggatagaacaggatgtaaagcagcgtgccatttattttattgccgaaaaattggttattcttctaaacaagaataagattgtgaacaatatgcatgaagcatataaactgattgatacaggcgaatatggcttcggaacctttatttccggtccgtcaaagacggctgatattgagcaggctttggtaatgggtgctcatggggcacgtgatgtgatggtggtgctgatataagtgtattgtttcttatatatgcgaatcagtagttgaaatacctacttgattcagttagttaaaatgttattattcaattaattatctcgtttatttatttctcaatctccttgaaaatcagtatattagaagaataaaaccactcattattctaattatgattcccaaggagaaagagctaaaacttataaaaatatatatgtacatctgcgatatttaccagtcttcactgaagttttactgccagagattcagtaataatgcaactcctatctttacagaccaggaactgcttaccgtatatctgttttgcggagcctatcagcgatacttccaaatcaaagagatacatacattcactgaagaatatttgctctcatggttccccaacctaccttcttatcagacattcaactatcggttaaacctgatgagtgaggccattagtgaacttgtaaagcatctcattacattctttaaaccagaggattgcgattctatgacatcacttattgactctatgcctattattacctgtgcaggaaagaataaaacaggaaaggtagctactgaaattgcaaccaaaggatactgttctacaaagaacatgtattacttcggtctcaaactccatgctttagccttccgcagggaaggaactattccattcccggaaatgattctcttatcatcggcagaagagaatgacctgacagttcttaaaagagaagccgctgatagccttataaacagaaacatctttgccgataagatatactcggatttttcttactggggcaataagcaacaagaacaaggaactactatgctaactcccgtgaaagcaataaaaggagaggaaccagttattactcaaagagagaaagctggaagagaactgttctctactgctgtttcaaaggtcagacagcctatagaagcgtttttcaactggctgaatgagaaaacaaatattcaaagagcgatgaaagtcagatcaacatctggacttttagtacatacgatgggaaaaattgccatcgcattcatttatctaattttttaaaacaagaatcagaaatcaactactgattcgcattatatataaaaaggagatgaggcgaaaattatagggctcatctccttttattttatagaatattattagaatattttgccacacaaacggaacttaagtaccggatagacagtaagtttgtctatgatatcagtgaaatcattatcagcttctgctgttaaatcagacaaatctccgttattggtatatactttgggagtgttatggaattgcacacccatttcgaacatgaagccaattcgtttcttaggaatcgctcttccgaaacctagtccaagataaggacgaaatgaagaaaccttcaaaccaccagatatatttccgttctgatctacaggtatacgatagtttccgatttcaatacctacttcttgtccttctttaatcagttctgccaactcatcgctgtgccctttaatcttgatgagttttcctcctccgaaataagcaccaccgcatacaaaaaaactggatgatttgaaaggatatacattcagcaatatttcaccggcagtacgtcccattcctccttctacatctatgctggtaggtatatttccttcataagaaccttcaatatctacatccacatctgtagaataagtaaagttcggcataaaagaaactcctgcacgtacagccaagtaacttcctataggactggctacatcaatacctatacctgtggtacttgcactgacgcctacagctaatgaattaaaaataccaggactttcagaagagtcttgagcagccatctgatggttgcctacacacataatgtaagttaggcagagtaatagtagtcttttcatatttataataatttatgttttagatgcgaaattagataattttattgaaatgatgaaatatttccattgatttatagcaacatcttgtcttcagtatatttttaatttaaatatacggtattgaaatattcaccaaataacgttttggctgtttccaattgttttagagtattttcttttattccgtttagtttgtattcttttcccatggcttcatatttgtgtacgcctaatgtatgataaggtagtatttctactctttgaatcatttgataattcttgaagtgctctcctaatgcccgtatatcttcctcaaaggaactatagcctggaactaatacatagcgcaaccaaaaaggctttccgtttttttcaagccatccggcggtacgtatggtttgttcgttgctgcgttctgtcagttgccgatggcgcacattattaaattccttgatgtctaataatacgaggtctgtccattgtagcagttcctttacttcttcattccatatactgccgttggtatctatacagatgtggatgctttgttcttttaatcgctggaataacggaatcagtgcttttgcttgcaatgtaggctcgccgccgctgaaagtcacacctccttttttaccgaaaaaagctttttggctgacggccatacgcacaatttcgtctattgttgtttccgtactttcacctttggtgtcaattgtgtcggggttggcacaatagaggcatcggaaattgcatccttgtaaaaatacgactaagcgtaaaccgggaccgtcaaacgtccccattgactcgtaagaatggactctgatcataatggtttgtctttaaactggtaagggcaggtttaaaacccgcccctacgatgaatgtatatgtgatgttacattctttcgtggaaagaacggctgattacttccagctgatgttcacggctcaatttgatgaagtttacggcataacctgatacgcggatggttagttgcgggtatttttcaggatgttccattgcatcttccaacatttcacggttcagcacatttacattcagatgatgtgctcctttggtgaaataaccgtccatcatggttaccaggttctctatacgggtttcctggtctacccctagtgattttggtacgatagagaacgtgttactgatgccgtcctgggcatcacgatagcgtagtttggctacagaactcaatgaggcgatggcaccgttcttgtcacgtccgtgcatcgggttggcacccggagcgaaagccactcctttggcacgaccatcaggagtggcacctgttttcttgccgtacattacattggaggtgatagtcagcagtgacagggtagggcgggcatttttgtataccggatgtttctttaattcttcactgaagaaataaaccaaatctacccctaagtggtctacgcggtcatcatcattaccgaagcaaggatatgcattttcaatatcaaagccttcggtcaaacctatatcattacgtttggcacgtactttgccgtatttgatggcagacaatgagtcaatggcaatggacagaccggctacgccatatgccagattgatacgtggatcggtatcaatgaatgccatttgagccttttcataataatatttatcgtgcatatagtgaatgatattcatcgcatcattatacacacgtgcaatttgcattaatactttcttataattagaccatacttcttcaaagttcagcaagtcccctgtcaatacaggaatatctttcaccattacagttcctgtattctcacaacgtccgccattgatagccagcaatagggctttagccagattgcaacgtgctccgaagaactggatttgtttgccgatagcctgataagaaacgcagcaggcgataccataatcatcacagttacgcacttcgcgcatcagcgtgtcgttttcgtattgtatagaagaagtgtcgatagaaacttgtgcacagaattctttgaaaccttccggcaattccggactccacagtacagtcatattaggttcgggtgacggacccagattgtatagtgtctgcaagaaacggaaggaagtttttgtaaccttggtacgtccgtcgttgaagcgtccgccgatagactcggttacccaggtgggatcacctgcaaagatatcgttgtatgattgcatacgcagatgacggaccatacgcaacttgataatgaactggtctaccagttcctgcgcaaatgactcgtcaattttaccatgatccaaatcatattgaatatagatatccaggaatgaagaaacgttgcccaatgacatagctgctccatcttgttctttcacggcagcaagatatgccatataaacccactgaacagcttcttgtgcattagtagcgggacgacccaagtcgagtccgtaatattcacccaatatctttatttctttcagtgctttgatttgttcggctacttcttcgcgcaggcggatacgggcatcggtcatcggactggtgatattgtgcaaatcttcttgttttgcttcaatcagtcggtcgataccatacagtgccaaacggcggtagtcaccgatgatacgcccgcgtgcataattatcgggcagaccggtcaggaaaccgagtgaacggaaagagcggatttcttcggtgtaagcatcaaatacgccatcattatgggttttgcgataatgagtaaagatatcctttactttttcatctacttccacaccgttttcatggcaggctttttctacgactttgataccaccataaggtttgatggcacggcgcagaagttcatccgtttgaagacctacaatcagttcgttttcacggtcaatgtatcctgctttatgtgaggtgatggtagatactgttacattatcaagggaacgaactccgttattggcacgttcttcttctagtgccttgaggcattcgttccacacttttttagttcgctctgtggggcctgccagaaatgaggcatcgccctcataaggggtaatgttggtatgtacgaagtctgaaacattaatttccttactccacaatccatccttaaaaactttgttcatttccatactgttattccattattaagagatttagggctgcaaaggtactccttttttgtgagctatgcatcactattagtaggtataatgcgaatacttgtgcatttttaagtataaagtggtcaataaatgaaaaaacaataaggactctttataacaattccataaaaaataaagctaattggtggcaataaaccaattagcttctaaaagtagcggaaccgggaatcgaacccgagtttcagccgtgagagggctgcgtcctaggccactagacgataccgccatcagttagtcttaattctttttctaagacggtgcaaagttagaagtttgtttttaatctgcaaaataaaaaatgattttttttatgctattactattataaatcggaatttaatttctatgaagaagtatcatatgttttatgtagtaaaattgaaagtctaaaaaacacctttactcttcctcccgaaagcggctcagcggaaatttctggttgttaagttttaaaattagctacctttgcttacctttgttttatgaaacccgaacgactccttcgtgccatccttccggatgtgcttatagacaactttgatattgtcaatttcgacaagagtgctgaccgttttgatatttatcttgatgaaaaaaaagttcagctaaaagaagataagaccaacccggatatcatatcctatggttttggtgagtaccgtacaatccaagactatcctattcgtggtcgcgccacttatctccatgttcgtaaacgtaaatggcttgacaagtcttccaatgaaatcttcagctatgactgggatttatccgaatttgacggtacacggctgaattctgagttcgtttcttttttaaaagaaggagattgaatctactcctgtgagtatctgtgtgcttgcggaacgttatggcgtaaaagggcagactcttcgtaaacaatacaaggagaaaatcagtgattaccggaactgggaccaactcgaacatgcgcatgactacctcctttatcctgaaaacattggagaaaacctttctttggatgaaacttgcctgagcaatggagatgtttatacgattctgaccaataaagcagctaaaggccgtaagggggctttagttgcaatggttcgtggagtggccacagatgcggtaagcggaatcttgcgcaggcttccgcaccggaaacggctgtctgtcaagactgtcactacagatttatcttcagccatgatgctgacggtcagaaaggtgtttcctgccgcaaagctgatcaatgaccgttttcatgtacagcagctcatgtctgaagctgtagaccagttaagaatacgctatcggtggaaagtacttgatgcggaaaatcaggctatcagggagcaccgtcaaaagaagaaagaagcaaagagtaaggcggaaagggagagaatagggaaatgggagcctgaaagaatggagaacggagaaaccctgccacagatagtaagcagaagcaagcatattatactgaaacactggagcaaatggaatgaacagcaaaagaccagggctgccattctctttgataaattccccaagcttctggaaggatacagccttagcatgaaactgacagacatcttcaacaagaagtcaggtcccgatgaagcaaggctaaatctcgcaagatggtacaatgaagtggaaaagtttgactatatggagttcaacaaggtacttgataccttttcaaaccatagtacgaccatcataaattattttgaagaacgattgacaaatgcttcagcggagtcgttcaatgctaaaatcaaagcttttcgaagccagttaagaggggtggctgatctgaagttcttcatgttcagactggctaggctatacgcttaaaagaaagcttgccaacccggaaaatccgctgacccccgaaagccttgacagcaaactgttgaaaaatgaatataaaaaataagtcgtaaaattaatttacgacttattcgcggaagctgggggattcgaacccccggtacggttacccgtacgtcagtttagcaaactggtggtttcagccactcacccaaacttccttcttatcagaagcgttatctctcaaacgcggtgcaaagataaggggataaattgaaatatgcaaaccttttgctcttttttttagatatattttttgatggaaataataaggtgctgatagtgaagtgttaataggtggaattaatttttctcccaaaaatccaaacattctttagccacctttattggacaatggtgttttttaatatattcaatgctgtcggcggataattgagaaattttatttgtattggctaataaactctctagtttgttataaatgtcatttccttcggggcgtacgttgatgatagggcgaagtctgtcttcgcctaataagttgtaatgttcctcttctgcacctcccaccactacaattcctttgctcatggcgtataatgcatttaatcccggagaataagaataaagctgatctaacattacatcgcacccgtccataaaatgttcacattcatcatacggagtgaaaacggtttgtttgatttcgcatgcagatggatgtctgtaatataatttatagagggcgctataaagttcgtcttttcccttccattcttcacgatgatgttttagactgatatagaattttactttttctatttttttaaaagggatttgtgggtgaggcaatgattctatcgggaaaggaatgtatttggtttttccagagaaatagggttggtaggctaaataggattcgtaaagactggtgatgattccattacaattgttcgcgatgatacggtttaattttcctctgaatccatgcatccaatttataattgccattttgttgtcaatggtgtcacgaaaagtgccattggcataaaaatcattatatcggagagcgtttttatttaagcacatgtaaatccagtaaaaatcatattcaaaccctcctaaaaatatcttcttgttgttctttttaagatattggaatacgtactgaagcagttcgggttttaattctaaaaagtaagggttgacaagttgtaccacatcatatcctctgagttggggaagggttttcagtaaattgaacgtgtttttaagaactccccaacggattgatgaccggttgggatagagatagtcagagttgtttagccataaattgctgtgggataatacatcgactctatgtcccatatttcttaaggcttttgctaaagtccaatgtatattgctatactctcctattaataagattttcataaacagtcaatcattatttaattaaatagtttgtgcattggtagcaagtcgttttgctattcttatttttctatttaacaaacaagtgtaggctttagttcttattgtagggtgattttgcaataaaaaaggataatttgtcttctgttgtagctagtattgtctatgaaaattaaatctatcaaaaatatatattcttgtattacagaaaaatgtgtgtagtggaatgattgaaaatgtatggtttgcaaaaagattttgtatttcaaaaaaatgaaaataagtccttcttcaattatgcatagcggtgagaaattgctaaaccttttcttttagaagattgttttcatacttatgtgaggtatggtgtccattttgatatggtcttttggggaatttattgagtaaagaatatttaagtgttaatgaaagaatataggttaagagttaaagaaaaaataatgaaggctgatttggcgacaatcaggagggaatatacaaagggtggtctcaaaaggagtgatcttcctgataatccacttgtcctttttacaaagtggctgcaagaagcgatagatgcggaggtaaatgagcctacggctatgttggtaggtactgtttctccggaagggaaaccggcaatacggactgtgttgttgaaagatttgcatgatggcaaatttattttttatactaactatggaagtcgcaagggtaaacatctggctcataacccatctatctctatatcgtttgtatggcatgaactggaaaggcaaattcatatagaaggtattgcggctaaagtatctccacaggaatcagatgaatattttagaaaaaggccttacaagagtcgtattggcgcccgtatttctcctcaaagcgaaccgatagaaagcaggatacaacttattcgtgattttgtgaaagaaaccacgcgctggatagggaaagagatagatcgccctgaatactggggaggctttgctgttatgcctgttcgtgttgaattctggcagggtagggtaaatcgggctcagcggaaatttctggttgttaagttttaaaattagctacctttgcttacctttgttttatgaaacccgaacgactccttcgtgccatccttccggatgtgcttatagacaactttgatattgtcaatttcgacaagagtgctgaccgttttgatatttatcttgatgaaaaaaaagttcagctaaaagaagataagaccaacccggatatcatatcctatggttttggtgagtaccgtacaatccaagactatcctattcgtggtcgcgccacttatctccatgttcgtaaacgtaaatggcttgacaagtcttccaatgaaatcttcagctatgactgggatttatccgaatttgacggtacacggctgaattctgagttcgtttcttttttaaaagaaggagattgaatctactcctgtgagtatctgtgtgcttgcggaacgttatggcgtaaaagggcagactcttcgtaaacaatacaaggagaaaatcagtgattaccggaactgggaccaactcgaacatgcgcatgactacctcctttatcctgaaaacattggagaaaacctttctttggatgaaacttgcctgagcaatggagatgtttatacgattctgaccaataaagcagctaaaggccgtaagggggctttagttgcaatggttcgtggagtggccacagatgcggtaagcggaatcttgcgcaggcttccgcaccggaaacggctgtctgtcaagactgtcactacagatttatcttcagccatgatgctgacggtcagaaaggtgtttcctgccgcaaagctgatcaatgaccgttttcatgtacagcagctcatgtctgaagctgtagaccagttaagaatacgctatcggtggaaagtacttgatgcggaaaatcaggctatcagggagcaccgtcaaaagaagaaagaagcaaagagtaaggcggaaagggagagaatagggaaatgggagcctgaaagaatggagaacggagaaaccctgccacagatagtaagcagaagcaagcatattatactgaaacactggagcaaatggaatgaacagcaaaagaccagggctgccattctctttgataaattccccaagcttctggaaggatacagccttagcatgaaactgacagacatcttcaacaagaagtcaggtcccgatgaagcaaggctaaatctcgcaagatggtacaatgaagtggaaaagtttgactatatggagttcaacaaggtacttgataccttttcaaaccatagtacgaccatcataaattattttgaagaacgattgacaaatgcttcagcggagtcgttcaatgctaaaatcaaagcttttcgaagccagttaagaggggtggctgatctgaagttcttcatgttcagactggctaggctatacgcttaaaagaaagcttgccaacccggaaaatccgctgacccgtaaatcgtttgcatgatcgttttctctatatgcttcaatctgatggtgtttggaaaatagaaagactcgctccttaatcttcggaatagagaaataattccaggttctttttcaaactgagccgagaaaccttttgaatgtaggtgtaaataggaatacttttgagtaattgaaggcgttgctttttatatattatatgcaaaagggaataatctatggattattcccttttgcatatttatttttgaagtgatgaggaggttcctggcggattcgaaccgccgtacacggttttgcagaccgctgactaagccactcatccaaggaaccttattgttatcaatctttgtttctcgattgcggttgcaaaggtacgacattttttttaatctgcaaatattttgctatttttttctcacttttctgcatttttttcgcaaccgcactttggcttgttgtgcatagacttcatggcgcaatcagaattacagcattcacacggattgctattgttctttatgcgcttgaaatactgaaagatacgtatacttatccatattgtacagaggcatacgattgcaataactataatttgttgtaattccatgcttgataaacaaataattttaggtttaggtttattaaatgataatacttcctatttggaatacggtaaatgcaacaagccaagccaatccagtggtgtatcctgctgcgaatatggcccatttccaactgccggattcttgcttgattgctgcgaaagtggcaatacaggggaagtagatcaatacaaacaacatgtaagctaatgcaaccagtggagtaatgggaatacggtcagaaagattcacattttccacatctccttcatttgtgtataatactcctagtgtacttactaccaattctttagcgcctacacctgaaataagtccgattcctaacttccagtcaaatcctagcggtttgataacaggctctattgctttgcctatttgtccgatatatgaattttcttgttgttcggctacgctttcatgagcatcatgccgtggataataccctagaaaccaaataataattgaggcaatcatgataatgcctcccatctttttcagatattgtgctcctttttcccatgtatgacgcatgatacttttagaagtaggcatacgatagggggggagttccatcacaaatggagaatcttctcctttcactagaaatttactgaaaatacgggccattattactgctaataaaatacctgctgtatagatacaaagtaacataaagctggcgcagttagggaaaaaagcacctatcataactaaatatatgggaagacgcgcactacaggacattaaaggattcaccaacatggtgattagtctggactttcgatcttctatagtacgtgttgccattatggcaggtacattacaaccgaatcccataatcagtgggataaaggacttgccatgcagtcccatccggtgcattattttatccatgataaatgcggcgcgtgccatataccccgaatcttccaatatagaaataaaaaagtataatatgaggatattcggcaggaaaacgataacaccgcccactccaccgataataccatctatcagtaagtctttcaaaggaccttcagccatattgtttcgtatcaggttgcctaattggtctactagccattcaataccttgcataggatagtcacccaaaacaaaggttccctcaaacatgatataaagaaacaggaaaaaaataggatatccccaaatgcgatgtgtcacaatactgtctatcacgcgggtcgtttgttctttttccaaatgattgtcggtgaatgtttctttcaaagctccggtgataaaaccatatttagcatccgtaatagcttgctcgctgtcttcgttcatcactttacggatacgtaatgtttccttgttgcgtatcgctatgatttctttgccattaggcagtgtagagatgaaattttctatttccctatcgttttccagtaatttgatggataggaagcgggtggaatatttatggcgtatgtcttcgttttgactgattgctttcttgacttcttcgatactgcgctccagttcaggaccgtggttaatatgaatatgacgcatatatccgcgtgggcgggcatcttcctcttctttgtggcttccgaattcgtggtcgggtacgtaggttttgtgccagtctctcaggtcttccagaatttcagaacgtatttcgcccttttgtgacaggaaatctcctccttcgtaaataccgatgataacatggaacagtttgtctacaccttctccccgtcggcagacagtaggtaccataggcaccccgatcagctggcttaattgggtataatccaatttatttccgctggcttccagctcatcgtacatattcaaggcgataaccatacgcacattcatatcaatcaattgggtggtaagatagaaattacgttccaagttagaagagtctaccacattgataattacatccggagtttcttcaatgatatgtttgcgtacataaagttcttccggagtataggctgaaagagaataggttccgggtaaatctacaatacggaaatgataaccttggaaatcgaaaaaaccttccttggcatctactgtcacaccactgtagtttcctacatgttcgtgggcgccggatgcaatattgaatagcgaagtctttccacaattgggattacctactaaggctacattgattgtacggcgtttgccttttgccagtgccaccagttctgattcgggcacgggtacatcttctgttatggaaccatggtaagggttttgcatcgtgcgtgcttcctgctcgcttaccacctcaatcatatctgcctcttgtcttcggagggagatctcgtaacctagtagtctgtattttatagggtctttcaaaggggcgttcaagattacctctacggtttttcctttaataaaacccatttcaacgattcgcttgcggaaaccaccgtggcctaaaaccttgactattacgcctttttctcctgttcttaattcggataaacgcattttgttttaaattttttgcaaagataagttattacttagaagtatgcaaattatttagattgtttttaaataaagaacgggcactttgtttttgtcttgcagaactcttatctttgtgccatgtttcattggaatattcagaagtatatagaggagaaacaacttttcaccttgcatgataaggtgttagtggcattgagtggcggggcagattcggtagctttgttgcgtgtcttgcttgttttagggtatcattgtgaggctgcccattgtaattttcaccttcgtggtgaggaatccgatagagatgaaaggtttgtcaatgagttgtgtaaaggattaggagtggctttgcatgttactcattttgatacggtcacttatgcttcgaggcatcatgtttctattgagatggcggctcgcgaaatgcgctatgattggttcgaacaactgcgtaaggagagggggggggctgttattgccgtagcccatcaccgggacgatagtgtggaaacttttttattgaatttgatacgtggtgcgggaatcaatggcttgaaaggtattagtccgcataacggctgcattgtacggcctttgttggaggtgagccgtcaggatattttggattatttgcgttgtttgcgtcaaggttatgttacagacagtaccaatttgcaagatgaatatatgcgtaataaaatccgtctgaatattcttccgatgttgcgtgagctgaatccttctgtcagtgaaagtatagctgaaacatcaaggcgtctgactgatgtttctcttatatataataaggagatagaggcgggaaaagaaagggtgatggaaaagtccggtcatattcttatttctcgtttgatggaagagagtgctccggcggctttgctgtttgagattcttcatccgttaggtttcaattctgtccaggcaggagatgtattccgcagtttgtctgcccagtcgggaaaaaggtttgtttctgccggatgggaggtactgcgcgacaggacggagttgattattcgcaggaggaagctggcggatgaggaagtggaggaaaatgtgcccccgttccggcttgcaatggaaacgcaggaaataatgccagactttgtcatccctaagaataaggatacggcctgtttggatgcagacaaggtggtgctacctctcacggtgcgtaaatggcggcagggggataaatttgttcctttcggaatgaaagggaaaaagaagatcagcgattatctgacagatcgtaagttttctcttttccagaaagaaaatcaatatgtggtttgctctgcaggccagattgtatggctggtaggagagcgtagcgatgaccgtttccgggtgacggaagatacgaaacgggtactgattatacagcagttgtgggataagtagaattttttcctttcctgctttttcatgaatggcagggaatgctccctgaaatcttgtagcaaaaatccgcgaatcatgcaacaagatttcagaaatcacgtagcaagattcgcggattttggatggagctttccggtattatttgcaatacttctgtatcagtccgtctaccacttcatcgcccagttcttttgctttggcaaagtttgcacaggcttctttgtttttctttaattgtatctggcagtatcccagcatgcggtatgcggctgcggctttcgggtctaaagagatagccttttccaatgcttctattgcttcgttatgttgccctacacgtagatgcaccgaacctttttccacccacatggctacatcctcaggagtcatttctactgctttattaatgtcattgatagcttgctgatacatcttacattgtatttccgcctgttcgcgttgcagataaaaggcggctgtaacccgtccaccgatagcatcataaaaagtatcataatctattaccgcttcacggtatttacctgtctgggcttttatttctgcccgttcatagaaataaggagcagcttccgatgtataaggcttggtgaaacgtgccacagcactatccatcaaggcaataacctcgttcatatctgttccttcaatcagttgtttggttttggctgccgagtaaaatgtagcagcagaggctatggaagactggttcactttctcataagcggcgtatgcctcaggatatttcttcatagcaaacagaatatctccctccaattgtgtgtaaatgggttggttgtcggcttgcatggcatcatgaatgatggagagagctttgtcgtaactccagtcaccgtatggtttcttgtcacctaaagagatgatgtacgaataaattaatttagcgatattatattgcgtctcactcttgttggtagtcacttccagtgctttcttcaggtcagcatctgccaaagcgttgtgttcatcatcactaaatcccatataagtagtggcacggcgtatatatccgtctgcgctgttgggatattgttccagaaaatcgtttaatgtggtgatatattcgttctgattttgttgtgaagatgccatgaacaggtacaccaatgcttggtcttctgtttcgggcagtccttttttgatgccgattttattcagtgacatgtcgttcaaagaaagggcggtgatgctcagtgaggtaccgtatgtagctccgatggcataactttccttggcctcatccgatgcgtttttttggattaaacctaatacttctccattggcattcataatagggcaacttacggttttttcgttggttgtcattgccagtgtataataatatgccttgtcgccaatggtgtctactttggtgacggtccctgtctggcaggttgccgctttttgagtcgagtagggtagcagatagactgtttcacctactgatgccggctgtgatgccgattttaatgctatggtctttttatcggcttcagtattaaattttacgatgtcatacatggagttggctcccaagatacgcaatacaggtaattctttactgtccgcgttaatgattactgcgcgttcggctccttcaaacagggtgtaatcagataatgctgttccattttcattgatatagaatccatttcctgtattcttgattttgttatctttatcgtatgtaacgatggaaaaaacggcttttttagctttgtcggcccactttggggttgcttgtgcatagcttagctgggtagctatgccgcatgccaatatcaaaagtactttcttcatgatatagttaattgtttgttaacgatgatacggtattttataaagcggatgccgtcttgtcttctgtgaagccgcgttgttttacagcttcataaatcagaatacctgcggcaaccgatacgttcagtgattctattttacccattaacggtattttgatccattcatcgcacagagaaaggtgctcgtagggaacacctgtgtcctcggctcccataatgatacatacagggtctttatagtttgctttggtgtaatcataatcccctttttccgtagctgctacaatcttgaatccgcagtctttcagatacttgatggtattagtcaaactttgttcgcgacatacgggaagagtgtgcagagctcctgcggatgttttcattgcgtcagcattgacactgacactgtttttcgagggaataataatggcatctgcaccggcacattcgcaggtacgggcaatggctccgaagttacgtacatcggtaattccatccagcatgacgaataagggtgtttttccttcttcaaacaagaaaggtaccagattttctgttttctggtaggtgacagaggagatgaatgctacaactccctgatggtttttccgggtgatacggttaatacgctccacgggtacacgctgaacagggatgagggtatttttcaaacaggtaaacagttctttggacagttcgctctgtatatctttcttcaccaatactttatctatctctcttccggcttgtatggcttcaataacagcgcgtacaccgaaaatcatttcattcttttctaacatgtctaattagtggttaatggttagtgacaggtggttagtggtaagtgattaatgtctgcaatatgacagtccataaatcacttggcactagccacttatcagcgcctttgcattgttcagggctgcctctgtcaaggtagctccacttagcatattggctatttcttttactctttcttcatcagtcaagcggcggatgtagctgttggtgcctgtttccgtatcttccttatatactttataatgagtgatgccgcgtgctgcaatttggggcagatgggtgatactgatgacctgacggttttgttttcccatttcctgcatgatgagtgccattttctcggcgatggaaccggaaactccagtgtctatttcatcaaagatgatagtaggcagtttcacagctccggctatcatggctttcagcgaaagcatgacacgggcaatctcaccgcccgatgctacggaagctacattttgtaatgttccattcttgttggccgaaaacaggaatgtcacactgtccatccctttactgtccggttccttgcgcggattcagttccaccacaaagctcacattgggcataccgagaggaaccagcaggctttgcatctgtttctcaatgttcttacccgattgggaacgaagctttgtcagcacagcggcttgctttatcactttgtcatatagcgtttctttttgggcggtaagttctgctatacggtcgtcaaaagaagtgatggcgttcagcttctcatggtagtcggtttgcacagctatcaattcctctattgtttgtacgtgatgtttctgttgcagagagtagattaagttcaggcgttcatttacataatccagacgggtggggttgaactccacttcctcctgtgcgcctgctatttcatgcgacagatctttcagctctatgtaacaactgtctaaacgccctatccattcctgggcacgtgtgtacactctcgctatgttatgcagggtttgcatacattctttggtagcggacaacaggctggcatcttccgaagacattatttggtccactttgtacaagctcgcttttatttcttcggcatgactcaaagtttcggcttcctgttccagttcggtttgttctccttcctgaaggtttgcatcatccagctgttccagttggaaccggatgtaatcttcatccttccggctttgctcggcttgtgttatgaaatcggccagctgtttgcatacgttcttgtactcggtataaatatttttgtatgctgaaagttcgttgtcattttgtgccaggatatccaatacattcaattggaatccctcactgttgagcaacaggttttgatgctggctatgtacatctatcagtttctcgcccagttccttcatctgcgccaatgaggccggcgtgtcgtttatgaatgcgcggcttttgcccgatgcatataactcgcggcggataatacattcattcggatcatattccaaatctctttgggtaaagaaaggctccatctgataggcggagatgttgaaacgtgcttctacaatacatttattggcgcctttcttgatagctttgatatcggcccgctgtcccagtaacaagccgatagcgcctagaataatcgatttaccggcgccggtctctccggtgatgacagagaaaccgggggtgaaactgatatccaatgtatcaatcaatgcataattctgtatatagatagattgcagcatattcttgctcctttttaataatttgctggtttgtcaatttgctaatttgttgcgctgtattccgcatggtaattagcacattgacaacgtggcaaattaagaaattatttattatttaccagtctgtcaataatatctcttgctacttcctgtttgcttttcagcggataaggagttactccttgacggtctataatcgttattttgttggtatcacaacgaaaccctgctccttggtcgttcaatgagttcagtacaatgaaatcaaggttcttacgttccagtttttcttgtgcattttttgtttcatcatttgtttccaaagcaaatcccactaatatttgtccgtcctttttctggcttcccagtgcggcggcaatgtcttgtgtgggtttcagttgcagtattagattatctttctctcttttgattttatgaccggatacagtttccggggtaaagtcggccactgccgcacacaggatgccagccgaagctgtaggaaactcgcggatggcggcttcgtacatttctccagcactttccacatctatgcggcggatgttagggtgatgggcctgaatcgttaccggtccgctgattagtgatacttccgctccacgtgaagcgcattcttcggcaagtgcgaatcccatttttcctgaagaataattgccgataaagcgtaccggatctattttttcgtaagttggaccggcggtaatgactactttctttccggccatgtcttgttgtttggcaaagaaagcttccagtatttccactattttttccggttcttccattctgccttttcctaccagatggcttgctagctccccttctgccggttctataatgtgatttccgtaagaacggagcgtgtccagattcttccgggtggaagggtgtgcgaacatatccagatccattgccggagctacgaatacgggagctttcattgacagataagtcgtgatcagcatattgtccgctattccgttggccattttaccaatagtggatgcggtagccggagcgataatcatggcatccgcccatagtcccaaatcaacgtgactgttccatgttccgtcacgttgagcaaaaaactcgctgataacaggtttacttgttaatgcagataaagtgataggtgtgatgaattctttgcctgcgggggtaatcacaacttgtacttccgctcccttcttaataagtccgcgaatgagtatagccgctttataggcggctatacttccggttatacctagtacgattttttttcctttcatactcatttcatcattcccgattcacgtagtctgatttttgtcagtacgtttttcgtgttcagcgtaaaatcaccgttcagtatccagctgtagtagcccggatctttttgtaacacttcgctgacagacattcctttgtatttcccaaaattaaatacttccacgcctttgtcatcataaacaatgcgtccggcgaaatctacattcttgttgaaacttgagtattcggctagaaatgccatatcattttgcagttcttccggatagcggtccaattgggatttcagtacttcgtatgtggcgcgtgtgtcggcttcggctgtatgggcatcttccagattcttgccgcaatagaatttataggcggcagacagggtacgctgttccagtttgtgataaattacctgcacgtcaatgaattttcgtttcatcatgtcaatgtctactcctgcgcgcaggaactcctcagccaaaaccggaatgtcgaaacgattggaattgaaaccggccaggtcacatccctcaatgtcccgggctatctcttttgccacttccttgaaggtagggcagtctgccacatctgcgtcataaataccgtggatagcagaggattgttcgggaatgtgcatttccggattgatacgcatggtcttcgtttcttcgttgccgtttggatacaccttcagatagcatatttccactattctgtctgtgtttatatttgttcccgttgtttccaaatcgaaaaaaacaataggattcttcaagttcaatttcattttcagcttgtattatatattgtttttccaccacatggtggcgtgtcgtttttagtcgttcagcatcataggcatcagcagcatcagcaggtcttcgttctcttcctgctctacagggacaataacgcccgcacgtgaaggatcagccagttcgaaaagtatttcctgtgctgagatattgtttaaaatatcaatcaggaatgttgatttaaagccgatgctcatgggacttcctgtatattggcaagtcagtgtttcttctgctgaggtggagaaatcaatgtcttgtgcggagatctggatctgattttcactgaggcggagttttatcaaactgcttgcttgcgatgagaatacagatacacggcggagcgcactgatcagcgtcatgcggtcaatggtggccttgtgaggattatcctgcggaattactgagttatagtttggatagcgtccttcgataagacggcatatcatactgtagttttctaatgtaaacgtagcgttacggtcgtcaaaatcaatttgcacatctccttgttctttcggtaacaggttcttcaacagggttgccggcttcttgggcagaatgaaagcggctttttcatcgccatgtgccacaaatgttttattgcgtactaatttgtgcccgtctgaggctacgaaagtgatgtcttcggtagtgatatcaaaataaataccattcattaccggacgtaactcatcatcggcagtagcgaataaagaacggttgataccagccagcatcaccggagcgcccatcgttacgtgtaccgcatttgcgcctaatgcgggagcttgtggatattcgtcggcattttgtcccatcaggctgtatttaccattctgatattgtacggtgatttccaggttttcagtatttaccaggaaagtaagtggttgttcgggtatttctttcagggcttcgagtatggtttttgaagaaacggcaaagcgtccgtcaccgtcactttcatttacttccagtgaagtggacagggtcgtttcgctgtcagaagcagtgagagacagcgttccgtcagttagttccatcaaaaaacaatcaagaataggtaacgaatttttagagttgataactcggctaatagcttgtaaatgactgaataatccagtacttgaaacgatgaacttcatagttttatattattatatttatattctatatctctacattcatttaactgccaaagttacgaaaagattatggttcaagcgcaaaaaatggcgaaaaaattagtttactcgcaaggaaaagtgtactttcgtggcgaatttaaataacgtaatatggaattagcaggaaaagtaatagcagtcctcgaaccgagaggaggagtttcaaagacaggaaatgaatggaaagtacaagaatacgtaattgaaacgcatgatcaatatcctaaaaaaatgtgttttgacgtatttggagcagataagatagcgcaatttaatattcaggcaggtgaagagttgaatgtgttttttgatgtggatgcccgcgagtggaatgggcgttggttcaacagtatccgtgcgtggaaagtagagcgtgtgggtgcccagggacctgttgcgctggatgctccgtttcctcccatgaatgctgctcccgctgcaccggtagattttgccgcgacagacgagaaggatgatttgcctttctaggggatagaggattcccataaacataaataagccggcaggatccgtgaaaaggattttgccggcttattttatatagtctgtttttatggtcattctcaatcatggtgtgaagtgttgatgggatatttgcgttccatgaatttccatttatcatccggtgtggtatgattacggtggagtaaattaaacaggcggaaactatattgctgtagttgccgcctgttctttatttggttaaataaaaaagtcttaaaatgtagtgtagaagatttgcattttcagcttattctcaggattcgttccaccttttaacatagcgctttccatacctaagttgttggatatttcaactatttcattgtttgaattggatactgctttgacaggtatgatgacaactctgttccagtccggatttttagcgtcccatttttttccgtcttcttccttttcaggatctccacctgctgctgttatgccttttttccgttcctcaatgcagtaagtgattaagggagcgatgttggtaaaggtgtatgtattgttactgctgctatatgaacttaagaaagaagtcttgttatcgataatcttgttttcttcaaagaacgagaacatatctttctttctgaccatcaatacatattgggggatgcccattttgtatttggactctttctcgttgtagcgtgtgaacgatacatttacaccatttagcgtatctcttttatgttcattgtaaatctctgcaatggggaaagtcgcttctgtaaaaatacctgccggacttttgaggtaagtatggtccggatcttgggctaactcttccaatctgctaccgttactgaagtggttggcttgtatcacttccttggttgctctaaagaaatagggcttgtaaaccaacgaatcccgcttgccggaagaactttctatcagggcttcaaaattaagattcaggcttaaaccgtcaatgtataaaatggttccgtcgccatgagtacagcgaatgtaaactccctttaatacattcttgataaaactttcaggagtcttgaaatactctttgttctccttgtatttgttgaagatgtgatcgcctaatgaattgggcaatttgatagtctgtataattgttctttgcttgacaccgctgcttgtggttgtagtttcatctttgcttgtagacggacctactgccgaataggcttttacagcgataggctttcctttttcgttgtaataatctttaggatccacactggtataaaaagtgcttagttctttttcaggaataaccttgtccaatgtgtcaacctgtaagcgcatggcattcagtgagtcgccaaagaaagacccgtattgcagacttatatttactccgatgactttggtcagctctttttcaaatttgaagttgtccatacaggtgaactgtgctataaaatcggcagtaaattctccaaattgctcatcggtatatcgtcctaaatatgcagtactggtacgtgcataaacggagtcggccaacagagatttggtggtaaactcataactgtctgtatttgccggaatcttatctccaccggggataagatcggtcccgatgccggttgttgaatcatcgcaactataaatcagtgctgccaacaacaatgcgcataagtatttgattttcatctttattattcttagtgagttatttcttttcaaactcccatactttgtcatagaactcattgaaagcatctacataggtatcggcaggctgatagtcgagcacaggcacacccgattcacgggcgaacttcatgacattctcattcactttctcgctgttttgtatcacaccatcagagtaggcaatggccagtttgcacagttcctcgtaatttgccggagatttgacgatgctttccacatcattcttttcaatgcctttcagcatgagtttttcagtcagattaccttcgcagttcgatttgaattcatcctcaaacaccgaaaatactacttttgagtctctgaatgacggctcatcttgataagccttcttaatataaaggggcacaaatgcactcatccacccttgacaatggataatgtccggacaccagcgtaatttctttaccgtttccaatacgccgcgtgcataaaaaatagcacgttcgtcattgtctttgtattctacaccattttcgtcagctaccatttggcggtgctggaaatagtcgtcattgtcaatgaagtaaacctgcatacgtgcagcttggatagatgctaccttgataatcagcggatggtccgtatcgtctatgattaaattcatgccggacaggcggatgacttcgtgtaattggtttctgcgctcattgacattgccccattttggcataaaagttctgatttctctgcctttttcctgaatagcctgaggaagaaatcttcccatgtttgccatttcggattcgggaacgtaaggggtaatctcttgtgtaataaataaaactttatttgccttcatcttaactttttgttgctcataatcattttgcaaagatataaaaaaaatagatgagagtggcaagaaacgaggaataataattccttatgatatgttaagtggctggtaattagtggttagtgattggcggttaatggtcaatgccttgcggaattaggtgaaaaatgggaaagaacaagtggctggccggtagctgaagagggcttattgcgtcatatctgcaaggtattaaccacttattactaaccactcatcattaattaaaattctttttttcttcgttatcttccaaataatggtttactttgcagccgttttaaatgaaactactcaaacaaaagagataaaaagatgaagttagttcaaacaatcaaagagcttcagtcagagctggatgccctgcgcagtgagggaaagacaataggtctggtgcctacaatgggtgcactccatgccggacacgcttcgttggtgaaacgtgctgttgcagaaaatgatgtagtggtggtaagtgattttgtaaatcctacccagtttaacgacaaaaatgacttggcaaaatatccgcgtacattggatgccgattgtgaattgttggaaaaagtaggagcggcttttgtttttgctccgtctgtagaagagatttatcctgagcctgatacccggcagttcagttatgcgccgctggacacagtgatggaaggccgtttccgtccaggacattttaatggagtatgccagatagtgagcaagctgtttatgattgtaaaccctacccgtgcttatttcggcgagaaagacttccagcaattggctattattcgtgaaatggtgaaacagatagggttcaacggactggaaattgtaggttgtcctattgtgcgtgaggaagacgggctggcattgagcagccgcaatgcacggctttctgcggtggaaagagagtatgcgctgaatatttcgcaaactttatttaaaagttgtacttttgcaaaatctcatccggtcgctgagactcagaagtttgtagaggatgcgattgctgccgctccgggtttgcgtttggaatattttgaaatagtagatggcactacgcttcagaaaataacggattgggaagatacggattatgcagtaggttgcattacggtattttgcggagaggtacgtttgatagataatataaaatataagggatagtgatcgttaaccattagaattatgatgattgaggtattaaaatcgaaactgcattgtgtccgtgtaacggaagccaatttgaactacatgggtagtattacgattgacgaggacttgatggatgccgccaacatgattgccggtgagaaagtgcacattgtggataataataacggcgagaggtttgaaacttatattattaagggtgagcgcggttcgggatgtatttgtctgaatggggctgctgccaggaaggtacaggtgggtgacattgtaattatcatgtcatacgccatgatggattttgaggaagctaaatcgttcaagccgacggtggtttttcccgattcggcgatgaacaagattgtataacgatatttttgttcggtaatccaaaagcccggtagacgtgagtctgatacgggctttaatttttgtatccgcaatcatagggcaataaaccttctttattatccggtggtatgattgcggataatcttttatatagatttctccttgataagtcctgtccggtaagccaccagcaatttctttaaatcgttaatctgtgtcaccagttcccgtcctttgtcagtgtcctttaccatcatgcgttgggtgctcatttctactatctgggtgctcgatttgatatcctgcccttcttcaatggctttttgcattgaggtgaacggttcgtgctgtaccagttggaatccgcgcgaatggtataccagtgtatatccggcaattccggtttccgaatgatacgctttagagaatcctccgtctatgaccatcatcttgccgtttgcttttatcggattctcaccttggatggtttttacgggtacatgtccgttgatgatatggcggtgtgttcctatcactccgaactcgtccagcagcatatcacatactttttcttcattgcgcaggctgtaatagtgaccttttacttccttgtgtaactctttctcttttaaaaagtaacgttcaaaagtagccattttgtctttgtcgaaagcaggggagtctttgccacaccacaagtaccatacatagtctacggcaaagggtctgtcctcgttgtcttcctcagcgaagaaggcggtacggatcaagtgccctaccttttccagcaaggcttttcctttgtacatttttccggctatggacacatctttcagcgtaccgtcggcattcaggggtatggaggcgtggaacagcagatttgagttgcttaccgtgtacatacatccgtaacggaacaggcagcggatatgttttttcaatttctcactgctgacaaacgaacgatggagtttgttcataatctcccgttcttcgtctgtcagcttataaggatcggcaggatttaccgtaggaagaaagctgtctttcagttcatattcttttccattgggcattgtgatagtcttacgctcaaaatctatacggtgtagcagcatacggtcgtccatctcgaaatcggggcggcgcctgataatctctgcttccagcttgaactggataacactgattgctttgtgcatctggcctatcatgcgcagtgtcttggcattgtaagtacagtcttctttctctactttcggtccgaatagggtgcagggatcgtctgcgtatgtttccatggcaaaggtggccaagggcagaaggttgatgccatatccatcctccaaggcggcaaggttgccataacgcatggccaggcgtagcacgtttgccatacagcagtcgttgccggctgcggctcccatccataaaatgtcatggtttccccattgtacatcgaaattatgataatcgcataatatgtccataatgcggtggggggcgggaccacggtcgaatatatcacccagcacatgcagtgtgtctatggtgagccgttggatgaggttgcataaagcaatgataaagtcatcggcgcggcgggtagaaatgatggtgctgatgatgacgttaatatacgcctgcttgttgggaaccattgagttttcgtgcaacaattcctgaatgatatacgagaattctttgggaagtgatttccgcactttggaacgggtgtatttggaggatacattctggcatacacgtaccaactggttcaacgtgatgacataccagtcgtccaggtccgtttccactgcttttaccagatccagtttttgttccggataataaatcagcgtacatagttcttttttttcgttctcgcgcagggtattcccgaatatttcatttacttttcttttaatggccccggaagcattccgcaatacatgctggaatgcctcgtactctccgtgcaggtcggcaaggaaatgttctgtacctttaggcagattcagaatagcttccaggttgattatttccgtactggcatcggctatagtggggaaactatgcgacagcagttgcaagtatcgcatatctttctgtatggtttccggggtgattgaattataagcgttcatggctggaaattatataaaaaacatgagtattaattgggctataatgacccggctgaacatggacagcggatatacggtggcataactcaccgccggattatcaccgggtaacgtgtcattggcatagttcaatgccatagggtttgccatgcttccacacagcataccacaggtgcttccgaagtcgaggcgggtcatgcggagggccactaatgccatgatgactaccgggataaaggtgatggcgaagcctatagctatccagatggctccttcggggcgcatcactgtctcgaagaaatgtgcacctgcatctagtcccaggcaagccagatagagagataacccgataccgcgcagcatcaggttggcactccgggtggtataagtgatgaggtggaaacggggaccaaagcatccgataagaattcctactacgataggtccgcctgccaggcctaatttaacgggagtgctgatgccggggatagcgatagggatggagcctagtatcaatcccagtacaatacctataaaaatggcggcaagattaggatccttcagcgttttaaccgcattgcctaatactttttccacattctctatggctttggcttctcccaccacggtcagccggtcgcccagttggaggatcagccccggtgtggcaagtagttgtaccccgctgcgcatcacacggctgatgttgatgccatagctgttgcgcagacgtaaagagcctagttttttcccgtttatttcggggcggctgataacgatatgtttggaaatcaattggctgtctatggcattccagtcgatgtcttctttattccaatcctggctttcctgttcgccgaaaagaatcgtgagcgagggagcgtccttttcggtggtgataaccagcagacggtcattctctttcaggattttttctgaagtggggatacttaccgtgccttcccgccataaacgggagataacaaatttaggatagcttaataaagctacttcttttatgcttttattgaaaatggcgggattgtgcactttgaaggtggcaatgaatgtctgattggtgtcctcgtgttcgtgaatgtcgatatctgagggacgaacaaataatttgcgtaccagcaacatggccagaataacacctaccactcccagcggataggttacggcgcaacttaacgctgcgccactggcgggttcccccatttgttttaaagtctgttgggcggcccccaaagcgggagtattggtggtggctccacaaaggatgcctaccatatcgctcatcggtatgtctcccagtttgctgaaaagcaccgtcatgaccgtacctgtcagaataacgcccatgcccagcatattgagctgtacaccgcctttacggaatgaactgaaaaagccgggacctacctgcaatcctagttcgtatacaaaaagcacaagaccgaaactctcggcgtaattcagcatattcgagtcgattgagaatcccaagtgtccggccagaataccggcaaaaaagacgaaggtaactcccaatgaaatgccaaacaggtggatcttacctaaaccgagccccacagcaatgataatcgagaggattacaaccgcctgtaaaggcgtgtgttcaaaaaataagctatttaaccattccatattgcaaagatagtacatttttaagttctgcaagcgataaataggtatttatggatggaacatgactcatctcgttctataaatgattcttttcctccagccacgcatcaatcaattttcttgccagactcagctttttgggtatctccggcaaattgtctttggtatagaaagcgccggcattcagttcttcttgttgtaatttgatgtttccgctttcataatcggcggtgaagcctatcatgattccgctgggataaggccacggctggctgccgaaatatttcaggtttttgatatggagtcctgtttcttccagtacctcgcggtacacacactcctccaaagtctcgcccggttcaagaaagccggctaccaaaccgttgaaagttccccggaagttgcgggcgtggaccagcagtatgctgtctccccggcgtatcaatacaatgatggcaggagagatgcgcggataaatttcctgacgacattgggggcattttttagcaattggagaaatctgtacggtaggcacgccgcacatggggcaatagcggctgttcttgtcccaattcagtatctggaaggctttgccacccacattgtactcttcccaaggcaatacgtcgtatgaactccggagatccatcatcaggtggcggtcattttcgcagccgggcaccggggcgtgtacggagaaagttttggcagtgtgtccctctatctctccgatggtgtggatagtgcttcccaccggaacaggcatgggaggctctgttccgaaaggtatggtgtacattccgttctttttctctatcagcagctgatccttataaaaaacgaaccagccgcaggtttctatatcttcttccatattcttttttaccttgttgcaattattgattcaatcctttcatagtgagctggatgcgcttgcgctctaggtctatgctcatcactttcacccgtacatgctgatggatgctgactacggtggtggggtcgctcacaaatttgtcggccagttgtgatacgtgcaccagacccttctctttgattcctatatctacaaagcaaccgaagttggtaatattgttcacaatgccgggcagttccattccttcagtcaaatcctctatggtctttacattcttgtcaaattcaaaaacttggatttgttgccgtgggtcgcgtcccggcttgtccaattcctgtatgatgtctgtcagggtgggaagccccactgtcggggtgacatacttcttgatatcaatccggctgcgtagttctttgctctttatcagttcgtccacggtgcagctcaggtctttggctatctgctccactatgggatagctttcgggatgcacggccgagttgtccagcggattcttcgcttgtgggatacgcaggaaccctgcgcattgttcaaacgctttcgctcccatccggggtactttcaataactccttgcgtgaactgaagggcccgttctcggtgcggtaatccacaatgttttgagccaaggcaggacctagccccgatatataagtcagcagatgacggctggcggtattgaggttcacacctaccaggttcacacaactttccaccgtctggtccaatgatttcttcaataaagtctggtccacatcatgctggtattgtcccactccgatagatttggcgtctattttcaccagttcggccagcggatccatcaatcggcggcctatggatacggctccacgcacggtcacgtcgtattcagggaactcgtctcgggcggttttcgaggccgagtaaatggatgctccgtcctcgcttactacaaatacttgcaattcacggtcatagcgttgtgaagtgatgaattgttctgtctcacggctggcggtgccattacctatggcgattgcctctatctgatattgttctaccaatttcacgatgctgcgggctgcctgtgagtattcactcttgggcggatgcggataaatggtttcattgtgcagcaaagagccttgggcatccagacagactattttacatccggtacggtagccgggatcaactcccatgacccgtttctgtcctaaagggggagccagcagaagctgtctcaggtttccggagaagacgcggattgcctcctcgtcggctttctccttgctcaaggctgaaaattcggtttcgatggaaggcttcagaagccgcttgtacgcatcacgtactgcctcgcctacctggcggctgcattcattgttgccacggacatacatttgttccagccgtccggcgcactcttcgtcatcggggcttatacttactttcaacaggccttccgactctccccggcggatagccagcagacggtgggaggaacagcgtttcaaaggttcgctgaaatcgaaataatcgcggtatttggcggcttcttcctctttgcctttcaccactttggaggtgatgacggcttgtcgggaaaattggttgcgcagttggttgcgggcacgctcgtcctcgctcacttgttcggctatgatgtcgcgcgcgcctttcagtgcatcctcttcgtctttcacatctcctttcacaaaagcggggagacggctgtccagatggttttcgcgttgcaataacagtaaggtggcaagcggttccagtcctttttgccgtgccgcttcggcgcgggtcttacgtttcggcttatagggcagatatatgtcttccacttcggtggcatcccaactttgttcaatgcgtttgcgcaattcttctgttagtttgccttgttcttctatggtagaaagaatggtttcttttcgtttagccagttcacacaacttgtcatttctgtctttaatttcgcctatttgtacttcgtccagccctccggttgcctctttccggtatcggcttatgaaagggatggtagctcccccgcccagtagagataatgtattgtctacttgatgtacggaaaccttcagggctgcggcaatcattttattgaatagttccatgtttgttgttttcttttggggggcaaaggtataaaaaaggtatgggtttatcgtataaatcgggtgtatttctgcaaagaaaaagagtcggtccgatgcgtttccagggctcacaaggctcaaggctcacttatgcggtattttaaaccttggtagatgtgtaaatgtttgttttacagattgtttactaaaacaagacgtgcggattgaatattattctttggtctttgggaagttcaggattgtcttgactttgtctgtcgttttatagaatttgtgtttgctttgaccaggcttgttttttgccgggttttattcataatggccggatcaatggatatggggcacattcggatttttcacgatgcccggaatgaccaagtgatgatgtcaatagaagtttcttttatttatacatttttctttccggtaaatgtcggatgcgtccgtgtatgtctggggctcattatattattcattttatttttcagactatagtcttgtttcctttttcttattgtaataaattgaaaatcagtgtatgcatggatttcttgaagcttgttttgggcttaaataccgcctaagtgagcctttgagccttgagccttggaaggccttgtgaaaagactttgtcattcccttccaaagacctgttctttgtataaaaagaccttgacgtttttatgaaagaaccttgtctttgacgccaaacatcaggaccttttttttaaatgtctggatctttttcaaaaacaacaagaccttttttcaaagggaacgggtacaaacggacagccggtccgtctcttttcccagatagtgtaataattatgaagaaactgtttattttacttgtgtgcctgttgcctgtgttggcacaagctcaaatggaaacttctgtagccggattcatccctttatccggtagcggaagaatagtatataatttcaatcccggatggcgctttcatcgtggagacataaaaggcgcggaagccgtgcgttttgatgatacatcctggcaagtagtgtctgctccgcatactgtggaactgatgcctgccgaggcaagcggttgccgtaactatcagggtgtggcatggtaccggaaacattttgtgattcctcaagatatgaaaggaaaagaggtgtcgcttcattttgagggagctatgggaaaacaggtaatttatttaaatggcaagagggtacaagagcacttgggaggataccttcctttcactgtgcaactgacggaacagggggtacagcccggagacagttgcttgctggcggtgatgacggataatagtgatgataagaattttcctccgggaaaacgtcaatataccttggatttcgcttatcatggaggaatttaccgggatgtgtggatgataggaaaatcaagtgtagctattacagatgccttggaggccgataaggtggccggaggcggagtttttgtgcattttgacaatataagcgggaaaaaagcggaagtgtatgtggatacggaagtacataacagtggaaagcggacgcgtaccgtagccgtggagacggttttggcggatgccggcgatgttcccgtaaaacggatttcgcaacaggtgaaactgcaagcaggggaatcgaagacggtgcggcaacagtttgcagttcgcaatcctaagttatggtctcctgattcgccttatttgtataggatacaatctcgtgtcaaagccggacatgaagttttggatgggggagtgacacgtgtggggatccgcaaagcggaatttaaaggtaaggatggcttttggttgaatggcaagccttttggtcaattggtcggcgcgaaccgtcatcaggattttgcatacgtgggtaatgcgctgcccaacagccagcagtggagggatgccaaacgcttgcgtgatgcaggatgtaccattatccgtgtagctcattatccgcaagatccggcattcatggatgcttgtgacgaaatggggctgtttgttattgtggctactccgggatggcaatattggaataaaaatccggagttcgcaaagctggtacatcggaatacccgtgagatgatacgccgggaccgcaatcatcccagtgtgctgatgtgggagcctattttgaatgaaacgccttatccgcgcgatttcgcactggaggcattacggattacacgggaggagtttccttatcccggacgccctgtagcggcagccgatgttcattcgaaaggagtggcggaaaactatgatgtggtgtacggatggccgggagatgatgagaaggcagaccgtccggaacaatgtatttttactcgtgagtttggcgagaatgtggatgactggtatgcacataataataataaccgtgccagccgtagctggggggaacgcccgttgctggtgcaggcgttgtcattatcaaagagttatgatgaaatgtaccgcactacaggacagtttatcggtggggcgcaatggcatccttttgatcatcagcgggggtatcatcccgatccgtatttcgggggcatttatgatgcgttccggcagcctaaatacgcttattatgcttttcgcagccagtctgccgcgacattgaagcatcctgtagcggaatgtggccctatggtgtttatcgcccatgagatgtctcctttctcggatgccgatgtggtggtgttcagtaattgtgattcggttcgtctctctgtctatgacgatactgagagctggacgcttccggtagttcatgcgcagggacatatgcctaatgccccggtgatattcaaggatgtatgggatttctgggaagcacgcgagtatagttataagcaaaaaaactggcagaaagtaaatatggtggcagagggaattatagacggtaaagtggtttgcacttataagcggatgccgtcacgccgcagcacgaagttgcgtatgtatgtggatacggaaggaaaacaattagtggcagacggttcggattttatcgtagtggtggccgaagtgacggatgatagcggtaatgtgcgccgtctggccaaagaaaatatcgtatttactgtagaaggtgaaggacgaattataggggatgcctctatcaatgccaatccgcgcacggtggagtttggctctgctcccgtattgatccgttctacccgcaagcccggcaaaataaaggtgaaggcccatgtgcagtttgaaggaacgaatgcaccggttgctacggaaatagaattagaaagtattccgtcagaactgcctttctgttatacggaggaggagacggatgcccaatcagctggagcaggactagccggaagccctgttagaacagaaagaatggcggggaaagttgtgctgacagaagaggaaaggcaaaaagtattgatggaggtggagagacagcaaactgaattcggtacggagaagtaatatagatggaacgcggatttatctcgttccaatctaaccaataattggtatttaactaatttcaatttaagtaccaacggattttttcttatctttgacctcggtttgaagaaaactaaatacttatgaagaaatatatacttattatactttgttgcctgacaagctttcctctgtggtcatataatgtgaatatgattgtggaacattattctgtagatcaagggcttcctaataatacggtaaactgtaccttgaaagacagagatggctttatctggttcggaacctggtatggcttatgttgtttcgatggagtgaagtttaaaacattcaataaacaggagcacgattcggatgtgccgccacgtaagatccagcgcatagtcgaggataaaaacgggtatatatgggtaaagaccattgaccgtaagttatatgtcttcaataaagtgaccgaatgttttcatgctgtttatgatgacatgaagaactattcggagaatatccaggtgataaaattacaaaatacggccgagggggatgtgttgttgctgactaaagataaaaatctgttattggccggggtagatgaaaaagggcaggtaactatcaagattctgttcgactctcggaacgagataaacaagcatgattatacactgaaacaccatgtcctgtgtgagacggaggaatatatcagttggataggaactgattataaggtagccgccgtgcataaaggatcggaattggcatcccggcctgccgattttataaccagtaagattaattccggtgacaaggatagttttaccagtttttttgaggatggcaggaaggtatgggtcggagatcgtgcgggtattttttacagtatcgatgtgaggaccggtttggtaaaccggtatgtactttccgaaataaaaggtgcgatcagcaatttgctggttactccggcaggttatgtctatctcagtgtggccggacaaggcacatacgaatatgatttggctgagcgcaggttgcaaaagataaatactgaaatgaatgacgctatggtaactcatgcattcatagaccagtatgataaaatatggtttcacgaaaatgagaaggcgctgatttattatgatccgttgaaccatactgcaaaacggtttccgtttaccatgttcggcaagataaccaccctgtattcggaagatgccggcgaaagagggctttttttcctgtctccggcaggagaggcctggttgttcgacagggaacatgcggagatggtttatatcaataaattgaaacaactttctaatgatagggcaaatcagcagttttatcatctgatgttggataatgacggggtattgtggctttcctctgccgatgaaggggtgtattgcatgaatttccccaagaagcaattcaatctgctttcgttgtctccgcaatcagtcggtcaggaaaattatgcgacaggggtaagagcccttttccaatcaaaaagtggcgatatctgggtgggcacccgttggcagagtgtttatcggatggaccggaacggtgtaaccaaacatgttttttcgacaggtgacgagcatataggtaatgtatatcacatcatggaagacgacaaaggaaacctttggttctctaccaaaggcgacggattggtgaaagctgttcctgatgagaaaactgcaggtggtttccgttttaaacgttatctgcataatttgtctgatttgtcgtcaatcagcgggaatgatgtgtattttacttatcaggatgaaaagaaacgtatctgggtgggtactttggacggaggattgaatctgctttgtgaggaaaatggggaagtcacttttaagaataaatataacggattcaagaattatcctacgtatggcctttatatggaagtgaggaatatgatagaggataatgacgggcgtatgtgggtaggtacgatggacgggctgatgtcttttaaaaacaactttgcctcagtggagcagattgattttgaaacctaccgtggtgccaaccgggtaaattatgccgatagcgatgtgtacgcgctttataaagacgagttctctcagatatgggtatgcgtgtttggtggaggattgagcaaattgtcgggatatgatgaggaaacgcataagctttcatttaaatcgtatggctgggaagacggattgaataatgatgtggtgatgtctattatagaagatgataacggtttcctttggcttgctacggaaaaaggactctcttgttttgacagggcgacaagccaggtgcgtaactatgacaaatacgatggctttcccccggttgtgatggaagaaagcaccacattgaaaacgctggacggggaactttggctggggtgtaaagagggtatcttgaccttttctcccgataaactggaaacgcaaagatttgattataacacatttattgtaggatgtcagatatcaaaccgggacatacgcagctatacggaccatcctattattgaccggtccattacctatacagacaggattacattgaatcataaccagtccatgtttactttagagtttgcggcgttgaactataataatcagaaccgtgtgtcttacaaatatattttggaaggatatgaaaaagaatggcactataacgggaagaaccgtatagcgtcctataccaatgttcctcccggcaagtatcttttcagagtacagacactggatgaggcaaatcccggtttggaatctttccgtgagttgaccgttgtcattctgccgccttggtgggccagttggtgggcgtatgttatctatatgattatagctgtagccttattgctggtggctataaaattatctcttttcatgattaaggtgaaaaatgatgtgtatatcgaacaaaaattgtccgaattgaaaatcaagttctttaccaatatctcgcatgagttgcgtactccgctgactctgatccaagggcctattcaggagttgaaagagaaagaaaaactatctcagaaaggaatgcaatacgtggatctgatggaaaagaataccaaacagatgctgcagctggtcaatcagatattggatttccgtaaaatacagaacggaaaaatgcgtctgcatgtgtcgttgtttaacctgaatgagatggtagactcttttgagaaagaattcagggtgatggccgaagaaaatgaagtcagcttcacgttccagctggccggtgaggatatcatggtatgggcggataaggagaaagtggccatcgtgatccgcaacataatctccaatgcgttcaagttcactcctgccggggggaatatttatgtcacgatgggagtgtcggatgatgacaagcattgttatgtacgggtggaagatagcggtgtgggtattccccaaagcaagctttccgaaatcttcgagcgtttctcgcaggctgacaatgcacgtggcgcttattatcagggaacgggcatcggattggctttatctaaggaaattatcagtctgcatcatggggaaatctatgcagagagccctgaagggaaaggggcagtctttaccattgaattgcaactgggtaaggagcattacaaaccgtcggaagtcgatttttatatgggcggggaaacggtgagtgttcctgaaactgaatctgtttctgcttctgccggcaaggaaagcgaggaggagaaagaacagcctgtcgattcgtctttgcctaccgtgctgattgtagaagataataaggatttatgtaatatgttgaagttgcaattggaagataaattcaatatttatatggccaatgatggtgtggaggggctgaagaaagtacatctctatcatcccgacatggtagtcaccgaccagatgatgccgaatatggatggaatagagatgttgcaacgcatccgtaaagatttccaaatcagtcatattccggtgattatcctgacggcgaaaggtaatgatgaagcgaagaccaaagcgataagcatgggagcgaatgcctatatcatcaaacctttcagcaaagactatttggtggcacgtatcgaacagttgctgaatgaacgtaaattgttccgtggacgtgtatggcagcagcccgaagaacataaggaggaacaggatacatacgaacagttcctagtgaagaaagatgtgcagttcattgaaaagattcatcaggttatagaagagaatttggataatagtgattttaatatagatactatagcatcaactatcgggctgagtcgctcggctttctttaagaagttaaagagtctgaccgggtttgctccggtggatttagtgaaagaaattcgtctgaataaatcaatagagttgattaaaaattcggatatgagtatttcagaaatagcttttgccgtaggcttcaaggattccggttatttcagtaaatgttttcgtaaaaaatatgatcagactccgagggaatatatgaatgaatggcgtaaaagttgatttcttgatcttataaagcaggaatcccgtaaacagatgcaagcgagcattgtgtttgcgggattgtcttgtttattcactaaattatttttggactttattaagatttagtgattacatacttttttgtgattcgtcttaattctaaacaataactagattatgatgaatgtgaaaaaaattatcagtttaattatgctcctgtttatgttactgcctttgggagcacagaattcagagggaaaacaacgctataaaatagctgcgtgtgactggatgatgctaaaacgccagaagatcggttcttttcaattaatgaaggaactaggaggtgatggcatagaaatggacatgggaggcttgggaaaacgggatacttttgataataagttccaccaaccccatttctgtaaattatttaaagaaacagcacaggaacaacatattgaagttccttctgtggcgatgtccggattctttggacaatctttcttgactcatcataattataaagctttagtgcaggattgtttgaatacgatgaaggtgatgggggcccaagtagctttccttccattaggtggtataaaagaggactggacagtagcgggtgatgcacgtcaggagttggtaagccgtttgcacgaagtgggagaaatggcagtgaaagatggagtagtgataggtatccgtacttctttggacgctggagaggatataaaactgttgaaagaaattaattcgaaaggtataaagatttattatagttttcaaaatgcgttggaaaatggacgcgacctctgtaaagagttgaaaaaactgggaaaggatcggatttgtcagatacattgtacggatacagacggggttactcttccttataatacccgtctggatatgaatgccgtaaagcatacccttgataagatggggtggagcggatggctggtcattgaacggtcacggaataaggatgaagtccggaatgtaaagaaaaacttcgggacgaatgtcgcttatctgaaacagatatttcaacaagaaaaataagataatattttaattttaaaaaagattctatggagaatgaaaatgcatttcttcagaagctggacaagattggcaacttgacacaagtggtctgtctcagtctgtttctgacaggagtttctgttcagggagtatccgctgagacaggattccctatatcccagtcggtgcaacagactaaaactgtcaccggacaggtggttgatgaaactggtgaaccggtgattggtgccagtgtggtggtggaaggaactacaaacggtaccattaccgattttgatggaaaattcgctttacaggttccctcgggcaagaaggttgtcatttcatttgtggggtatgtgccgcaaacgattgctcctaaacaaggaaaagactttagagtggtgttaaaagaagattccaaaatgctggacgaagtggtcgtagtcggttacggtactcagaaggcaaaagatgtgacaggttctatcggggttattactccttcggaaatttcagatttgccggtgtcgaatttgggtgctgcgttggcgggacagatacccggtttgagcatcagtggtggtgacagccgtccgggtgaaggagcgactatgtctattcgtcaatctttctcgtattctaaagatggtggtagtactaatccgatggtcattatcgatgatgtgattcagatagatgccaacagcggtcttccgacattagaaactttcaatgcccttgatccttctgaaattgaaagtatttcagtccttcgtgatgccagtgctgctatttacggttcccgcgcttcgcaaggtgctattattgtaaagaccaaacgaggtaaatcaggagctcccaaaatcaattattcaggtaaattcggatttaataatgcagtgagccatcctaaaaccttaaaaggagcagcttatggacgttttgccaattcctttaatttggccaataataagataagtatggatccggatggaaactggatgaataaaatttatagtgaagcggaactggccgagatggatggcttgaattacaattggctggatgaagcctggtccggcgcttttacaatgaaccattcggtcaatgtaagtggcggtagcgagaaagctacttattttgcgggtgcttcttactatactcagggggcgaatcttggaaaacaggattacaacagatggaacttccgtgcaggtgtggatatcaaattgacttccgatttgaaattttctgcaaccatagcgggtaaccagcaggaaaccacatcaagttttaccaaaggtttaagcaatttgaatggttatgggggaactaagcccggtgaatccggtgattatttggttcttgctcatatgccgaattatttgccatgggagataacattggatgatggtaatacctattatacatctcctttgttgaacagttactcgagtgcgggtaatgcaacatccggcaataaaatgagtacatggaattattttgcaatggagaataatgacggatcttattccacgaatgataatttcagctatgatgccaacttctccgtcacgtatgccgttccgtttatcaaaggactttcattcaagggaagctatgcgttgaagcgtagtgccagtgatagtgagcaggcatttatgccatttacgttggcctatctgaaagcaagtgatgcgttgacacccggaaatcgtttttatagcgatcatccgtctgtttccgattatcaattaaaagaatttacaggaagtactcgtgtggtatattcagaccagatggctaaaaacgagcagttgaacttctatgtgaattatgaaggaaagtttggcaagcatagcatttccgccatggctgctgtagaaaaaatgcaggcttatatgcattccaagcgaatgttgtttaataatcctgacccggatggttatttgggtacttcgccaagtgcgggaactatggatacaggtaattctattacatataaatacaaacaggggtctttgtcttatttaggtcgtgtaagctataattatgccgataagtatttgttccaattcttattccgtagcgatgcttccactaagtttgctccatccaattattggggtttcttcccaggtgtttccgtgggttgggtagcttcggaagaagggtttatgaagaagctgctgccctcatggtttgaatacatgaaagtacgtttctcatggggacgtaccggtaaagataatatcaaagcatggggatggaagcaactctattcattggatcccagtagaggatatggattcggttctaacggcggtatcctgcagaccggtatcaagccgggagcaactcctaatcctgatgcgcattgggataataccgataaatttaatcttggttttgatttgcgtttcctcaataaccgtttaagtgcgactgtggatgtgtactatgatataaactctgacatcttgaatcagaatatcggtggtatcataggtactcctatttttgcaggaggtgctttgacagaagtgaattttgggcgtattgatgcttttggtagtgaattctctttgaattggcgcgataaaatagatcaggtgaaatataatatcggagtgaattttggatttaatggcaacagggtaagagaatggccccagtctgctccgagttatatacaggaaaattctgtaagagagggcgtttctactatattccctacatacgggtataaagtatggagaggtacaagtaccggagatggtattttacggaatagtgatgatattaagaattattggaattatttgtcagccaatgcggaagccgcaggcacttctcctgaatatttgggagtgaaagatgtcagtcagttgaaaccgggtatgttggcttatcaggatttgggtggcgtattgaatgaggatggtacgcagtcggggcccgacggacgtattgccaagacccaggattatgccaaactgaataagagtggaaagacatatggttttaccaccaaactgggggtggaatggaaaggcatcagttttaatatgatgattgccacttcatggggcggctatcgccagattgatgtcaataaaatcacaacatccagtggggatatgctttggacaccggactcattctggaaagatatgtttgatgaaagaaataatacgacggggaaataccctaatttaggtttggacaacagaatatcaggatcggtgattgcaccgtctgatttttggtctatcagtacgttccgttgctatatccgtaacttaagtatcggttatacgctacctaaggcatggttgtcacctttaaagatccagtcggctaaactaagcctgacaggtaacaatctatgggatttctataacccgtatcccgaccattatcggaatatgtattgtggaacaacttcattgtatcctacattgagaacgtggtcgttgggagtaaatgtatcattctaaaattaaaaagaatcattgatatgaaaaagcgtatattatatactgtgttattggcagccggcttaacgtttagtggttgcagcgaccagttcttacaggatatgaacccgtatgacagttattcaccggaaaaaactttcggtatcgaatctaacttggacttatatattcagaatgtgtattataactatttttataagtcggggatgactcctccgcaatcatacggtttgtccggtagttggaatgactattcaacttatacggaggagaaatgggggatcgagaagaaatttgacgcttccagaagtttgaaaaaagctacggactgtgaaacttattttggcagtaatctggctacgaatataaagaatgatccatatagccgtatccgcagttgcaatgaaattctggaaggggttgatgaatatggtcaggacttgtcggaagctgccataaaaaaagcgaaaggacaggcttatttcttccgtgctatgcagttgtttgatctggtacgtgtatacggagctgttcctgtggtaaataaagtgcttatggcggccgaccgtgagggagctaaagattataatcgtgaaagtgtggaaacatgtgtcaaccagatcttgagtgatttaaaagaggctgcgaatctgcttcccactcgtaaagaatggggaagtgaccagtatggacggttgaccaaggaagctgcgctggcatacagaagccgtgtggcactggtatttgcaagtcctatctttaatacagattggaataatacaggcaataaacgctggaaagatgcgttggatattactttagaggcacaggctttcttgagcagcgaaggttatggtttgtatggcaactccgccaaagactggaatgaaatgttctacaagtttgataaccaggaatgtaaggaggtgattatggtcaaactgttggctagctctacctctaaaaatgatgagcatagtggatggcagaaaacaatccgcttgaaaacaatgggtggcagtggttccggttatcatgttcctatgggtatgttggatattttcccgatggcggatggttccaaagctgtaaatgatgacggtgaggcgataaacgggtacgaccgttctttattcttcaagaatcgtgatccgcgtttctattacacgtttactttctccggagcaaaatggggatatgatcaggatgcagatgccgtagtttggaattaccgttggagcgaaacgaaagaagatggttctcagttgcattattacacggaaaatgaaggcagcagtccggcgatagtacgtaaaatgtccgatccggctgaaaatagtgcaaatacttatcaatgggatggcactgatgtatatgaatatcgttatgccgaattgttattgaaccttgcagaatgttatgcggctacgggggatataagtaattcagtgaaaacaattggtgaaattcgtgcccgggtaggtattcctgcatccaataattatggtttgggaacgattaccgataagaatgaagctattaaggcttgtctgcgtgagcgtcaggtagaattagcttatgaggggaagcgttattgggatttatggcgttggatgttgtataatgatgatgcaagtgataacaataccacctgtactaccttgggtattgaaccgttaaatggtactgcccgtgtgggtaaatatttgcaagtgaaggattatgacggaaaggcagatcctcttgcttctgtcattgctgattttgaacctgtagatgtggataatgcggcagacttacaagccgaaatgaataggttaggagagttctggagccagcattttgtcttggaggatagagaaactccggtagataatgtgaatggtcaggaagcagtaatctcatggcaggaaaactattatctgtccggtctaccttctaatgtgttgaatatgaatccgtggttggagcaatcaaaaggatggttggattattatgaatcagaaggcacattggatgctaggaaataatttaatacgatagttttatatctgctagtttattatgacagatacaagcatttttgagtacatatccccgaaaggcacgtcttgaaaaagataattgttaagaaaaagagaacggaatataaattccaacttacttatagcacagatataattttttaagaataaagtatgaaaagaaaattgtttttaggactgtgtatggctacttttattgctcctgtagcaagggcccagtatccccagataactgaggaagcgaagcaagcctaccagaaaatgatgagtgaagaacgtcgccgctctgacgaagcctgggcaaaagcattgcctgtcgtactgaaagaagcgaaagaaggtcgtccgtatatttcgtgggcttcccgtccatacgatttgccgcaggcacgaattcctgctttccccggtgctgagggaggaggcatgtacagtttcggcggtcgtggcggtaaggtgattaccgtgactaatttgaatgaccgtggtcccggttctttccgtgaggcttgtgagacaggtggagcgcgtatcattgtcttcaatgtttcaggtattattaaattggaatctcccattatcgtccgggctccatacgtcactattgcaggacagacagctccgggtgacggggtatgtattgccggagagtctttttgggtagacacgcatgatgtagtggtacgccacatgcgtttccgccgtggcgaaacaaaagtctggcatcgtgacgattctttcggaggcaacccgattggaaatatcatgattgaccattgctcttgtacttggggattggatgagaacatctctttctatcgccatatgtacgatcccagcgaaggacaatatgaatcaaaagatctgaaactgcctaccgtaaatgttaccatacagaatactatctcggcaaaagcactggatacttacaatcatgcattcggcagcactttagggggtgagaattgtgcatttatgcgtaacctgtgggcaagtaattcgggacgtaatccttccatcggttggaatggtgttttcaattttgtaaacaatgtagtgttcaactgggtacatcgttcttcggacggtggcgattatactgctatgttcaatatgatcaacaactattataaaccgggaccagccactccgaaagatactcctgtggggcatcgcatcctgaaacccgaagcaggacgaagcaaattggatcataaagtatatggccgtgtttatgccgatggcaatattatggaaggttatcctgccattacagaagataactgggcaggtggtatccagattgaaactcagccgaatacagagggatatacggagaatatgcgtagcaaccgtccttttgaaatgccatacatccgcattacttctgcacatgatgcatacgattttgtactgaaaaatgcaggtgccaacattccttgccgtgacatcgtggatgagcgtattatagaggaagtgagaacaggtattccatattatgataaaaagatggccaaagatgctaacggtgatttgaccggactggctcctaaatcaatgggagaagacggacagtttaaatatcgccgcttgccgaaagattcttataagcaaggtatcattaccgatatccgccagatgggtggttatccggaatacaaaggaactccgtatgtggatacagatggtgacggcatgcccgatgaatgggaaaaggcaaatggcttgaatcctaatgatccttcggatgctaataaggactgtaccggtgacggctatacaaatattgagaaatatattaatggtatcagcactagaaattgtattgactggtctgatttgagaaacaattatgatacattggcttctaaaggaaagttgatgtaataaacggaggaaagaagacaggatatgatacaaaagtcaggtataatgtttctgttgctcatggcggtagtcattaccgccggagcagtggatttggaccgtgaaggccgcgatccggcttacgtggaatctattgtgaaacgttcgcagaagattgtagataaactggaattgacagataccgttgccgcccgtgaagtgacaactatcatagccaaccgttattttaaattgaatgacatatacgaaacgcgtgataccaaagtgaagctggcaaaagaaaccctgacgggcgatgcgaaacaagaagccgttaaagctgccgaagctgaaaaggatgcggcactttaccgcactcatttcgctttcccggccgatctttcgctttatttggatgccaagcagatagatgcagtgaaagatggcatgacttatggtgtggtaatggtaacttataaagctacggttgacatgattcctaccttgaaagaagaagagaaagcgcagattatggcatggcttgttgaagcccgtgaatttgccatggatgctgaaaattcaaataagaaacatgctgctttcggtaaatacaaaggccggattaataattacctctctaagcggggatatgatttagtgaaagaacgtaaggcttggtatgaacgtatcaaggcacgtggaggaaagatataaattaatgtttattgaaaagcagaaaaaggagcttgcccggtaaaacggtgtcaagctcttttttatgtgtggatagagagtacaacaagctttctgttccgtctttgatatagaaatattcgcaatgtgtgtttgaatcatgttaaaagcagagtattatgttatgaagttatagaaaaaataataatttagcaaccaaatgaatcaactaaagaaactatttgcagtggcagcattgactgcatgtgtgttgcctgtggcggcacagtatcctgtaattcctgattcggtaaaaatcagaggagaacaacaacaaaaggaaatagaccggaaatcggatgaggcatgggcgaaagcattacctgtagtaatgtctgaggctactcaaggacgtccttataaaccatgggcatccaaacctgaggatttaataaagagcaacatacctgcctttcccggggcagaagggggaggggcctatactcccggtggacgtggaggaaaagtaattgtggtcaattcgctggctgacagtgggcccggaacgttgcgtgaggcatgtgagaccggtggtgcgcgtattgttgtgttcaatgtttcgggtgttatccggctgaaaacccctataaacgtccgtgctccgtatatcactattgcaggtcagacagctccgggggatggagtttgtgtaacaggggcttctttcttgcttgatacgcatgatattattatccgccatatgcgtttccgtcggggggcgcaggatgtgttcttccgggatgatgctttgggaggtaactgtgtgggtaatgttattatcgatcattgctccggcagctgggggctggatgagaatatgtctctttatcgccatgtataccatcgtgattccacaggacatggtttgaagcttcctactgtcaacataactattcagaactctattttctcggaagctttggattgttacaatcatgctttcggggcgactataggtgggcataacagtatgttttgccgtaacttgttcgcatccaatatcagccgtaactgttccattggcatgaatgaggattttaatctggtaaacaatgtgacttttaattggtggaaccgttctgttgacggaggagatgaaaccagccgtttgaatattattaataattattttaaaccgggtcctatcactccgaaagataagccgattgcctaccggattgtgaaacccgaatcgagccgtgacaagaagaaaccggatacttttggtaaagcgtatgttgccggaaatgtagtggaaggcaatgcgcgtgtgacaaagaataattgggatggcggcgtgcaggtatacgatatgccggacgcagggaagtttacagatcaaattcgtgtaaacgagcctttctcaatgccccatgtgactattatggatgccaaaactgcctataattatgtattggaaaatgccggggctactttccctaaaagagatgcggtggatacccgtgtgataaagacggtgaagacagggaaagctatttatgtgaaagacgctcctgaattcgttagtccttatgtgaaaagacgtcttcctgttgattcttataaacaaggtatcattacagatcctcgtcaggtgggtggtttgcccgaatataaaggtactcctgtggttgatacggatggtgatggtatgccggatgcctgggaggtgagatacggactcaatcctaatgatccgggtgatgcggtgaaagattgtaatggtgacgggtatactaacattgaaaaatacattaatggcatagatcctgcaaagaaagtggattggacggaagtaaagaacaatcacgatactttggcaaaacgtaaaagcttgatgtaaaatgaattataagttattattattgggatttttaagtttggggtttgcgcggatttctgcgcaaacctttcctttacaggtgaaggacgaaaaactgacttatgtgactgatgaacgtggaaaccgtattctagattattcttcttgcggttaccataattcggaacagcctatacctgatgtggcgaatgccgtttttgtttcatggcagcctggagataattcctctcgtatccagcgtgccattgactatgtatcttcattggctttggataaaaatggttttcgtggggctgttttgttggataaaggaacttttgaattgaatgagagcttgcgtatctctgtgtcgggagtcgtgctgcgcggcagtgacagggaacagaccgtattgttgaaaaagggagtggacagaggggctttgctttatattgaaggacggaatgatttggctgttacggataccttggatgtactgacatcatacgttcctgtaaatacttgtacttttcaggtaaccaataatgtacagctggtttccggagagcgggtccggattgtccgcccctctacgaaagaatggattgcttctgtcggttgtgatatttttggcggaggtatttctgctttgggctggaaagaaggagagatggatttggtttgggataggtcagtaagtaaggcggatggaaaccaattgactttggatgctcctttgacaatggctttggataataaatggggaactgtcaaagtgttacgttatagttggccgggcagaatcgcagaagcaggtttggagaatctgacattggcttctgactataataagaagtatcctaaagatgaggatcattgctggacgggggtatctatagaaaatgccgaaaactgttgggtacgcagggtaaattttaagcactttgcaggaagtgctgtgattatacagcgtaccggttctaaaacaactgtagaagattgtgtatccacagaacctgtttcagagataggtggaatgcgtcgcagtacattttatactatggggcagcagacactttttcagcgttgttattctaaacagggtattcatgatttctcagccggattttgtgcggcaggtccgaatgcttttgtacagtgtgattcggaagagtcgttaggattcagcggttctattgattcctgggcctgtggattattatttgatgtggtaaacattgatggccatgatttggtatttaagaatttgggacaggataaaaatggtgccggttggaatacaggcaacagtcttttctggcaatgtacagctgccgggatagagtgttattcaccggcaagagatgcggtaaaccgtgcatacggttgttgggcgcaattctcgggtgacggccaatgggcggaatcaaataatcacgtacatccccgcagcttgttttatgcacagttggcggcacgtttgaataaagattgttctgaccaggcacgtattcttcccagggctaccaacgcaaccagcagtcctaccgtagaagcggcaatggagatggcaaaggaagcttatactccccgtcttactatgcaaaaatggattgaggaagcaccctatacagccagtgtgtcttccggaaagctgaaatctttagaagatttgaagttcaagacacctatatataaggaaaaagaggatcatctgtttgccattattaatgggcgtatgcaggtggatggccggttactggtaggcggcagacaggaggttccttggtggaatgggaaactaaggaccagcttcttgtctaaagccaagccacatattacccgtttcgtgccgggacgcgaaggacttgggctgacggatagaattgattctacggtgaattatatggtgaagaatcagattttggttttagatcataattacggtttgtggtatgagcgtcgtcgtgacgatcatgagcgcgtccgtcgtcgtgatggagatgtgtggggaccattctacgaacaaccgtttgcccgcagtggaaaaggtactgcttgggaaggattgagcaagtatgatttgaaccgtcccaatgcatggtattggaaccggttgaagcagtttgccgaaaaaggggcggaaaaaggtcttttgcttttccatgagaattacttccagcataatatcttggaagcgggagcacattgggtagactgtccttggcggtcggccaataatatcaatcagaccgatatgcctgaacctgttccttttgccggtgacaaacgtatctttgtagcggatatgttttatgatatcagtcatcctgtacgtcgtgagcttcatagaaagtatattcgccaatgcttggataattttgccgatgatgcaaatgtggtacaactgatcagtgcggagtttaccggtccgttgcattttgtacaattctggctggatgtgataggagagtgggagaaagaaaccggtaagaaagcaactgtggcgttaagtgcgacaaaggatgttcaagatgccattctgaatgatacgcaacgtgcgaaattagttgacattattgatattcgttactggcactataaagtggatggtctttatgctcccgaaggtggaaagaacttggctccccgtcagcatgcccgtaaaatgaaagtaggtaaggttacttttgatgaagcttatcgggcggtgagtgaatatcgtaagaagttcccggaaaaagcggttacttactatgcgcagaattatccggatatggcttgggctgtcttcatggcaagtgggtcttgcccggttgttccagttgctgatgaaagctttttaactgatgcggctgctatggatatggaggatactggtacaaataagtatcagaaattggtaaaatctggtattggaagtatcatttattcccattctgcaacagatattcctgttcatttatcacctggaaaatacatattgaagtctgttgatccgaagaccggagcaataacagtgattgctaaacggttgaatattaaagatgtatatatgcttaaagcagaaaaaaacaaagattgtatttattggtttcatagaatttagtacatggaaggagaaccggatttattttggttctcctttttaatgaaaatctgtaatatttagcatatatgtttttcagcaggttatctgttttttcggtccaataatcaaatattacctaaaaaagtagcgtatcctccctagttttgcatcatcatcaaaacaacctataattagtatactgtgatggaacaaaacttaaatgataagacagcttgcttggtaaccgctttccaatcgggagatgtaagtgcattctctacattatatgatatgcatattaatcttctatttaattatggatgtaagttaactactgacaaagaattgttgaaggactgcattcatgatgtctttgtaaaattgtatacaaagaaggccgaattgggtatcattgacaacttcaaatcatacctcctcatttccttgaaaaataagttatgcgatgaacttcgcagacggatgttcatgtcggaaacggctgttgaggaactgaatcccgttgcagcaggtgatgatgtagaacatacatatttggaaaaggaaaaaagttgttttgaaaatataaaagtaaaacatttgttggctcaattatctccgcgccaacgtgaggcacttaccttatattatatagaagagaagaaatatgaagatatttgtaccattatggatatgaattaccagtcggtacgaaatttgatgcatagaggtattacaagattaagggaattggtaggataatattttaagtttccaggtgagtacaactttgaaccactatccgtcataatggaaaatgattgtaacgtggatacaaaaaaggtgtatagcaaggtagaagactttttgaaggatgacgactttatcaagtatgttctggatgatgctcctgaatcagcttttcattgggataagcttttaaaggagcacgcagaactgctgaaagtatttgaagaggccaagaatgtattattggtttctgatgaagcaatggaagtaatgactttatctgaagaaagaaaactaaaacatcgtatttttactacattagagataaataatatggattattaattaatttgttaaccatagaaaaatgagaaaagacatgaagaaatgtcctaagccgttgggttacggaatcagacgaacacctgttgtgttaggattatcagctgcattatgtatgccggctgctttttcgtatgcaaatgttgacaatggaatggatcgtgaatctgttctatctgttatgcaaggaaaaacaatcaaaggacaaatcttggatgaaacaggggagtctatgattggagtttctgtgttggtaaagggtacgactataggaaccgttactgattttgatggtaattatacacttgaagtgcctagtggaaagaatatattggagatttcctatataggttataagactaaagaaattactattggtaataatagtctgataaatataaaaatggaacctgatacacaggctttggatgaagttgtggtaataggttatggtactgtgaagaaacgtgatttgactggtgcggtagcttccatgaagaatgaagatgtgacagttgcccctactagtaatgtgatggaggctttacaaggaaaaattgcaggtatggatattgtgaagtctagcgggcaggttggtgaagatgtttctattttgttgcgtggctctcgttctatttatggtagtaatgaaccgttattcattattgatggtattcctgggagttatagccaggtgaacccttctgatattgagagtgtggatgtattaaaagatgcctcttctactgctatttatggttcagcaggagctaatggcgtagtcattataacaacaaaacgtgggaaggaaggaaaagctactgtaaactttgatgcatattatggtttcagtggttcacctaattataagcatggtatggttggagatgaatgggtgaattatcaaagagaagcttataagtataagaatggagattacccttctgatatgtctgctttatttggtaatcaagattatacggatgcctataatgctggaaagtggattgattggattgatgaagcctcaggtaatacagctacgacccaaaaatatagtctttctgtttcagggggtagtgagaagactaagatatttgcttcaacttcttataatagagaagagggtttattgagtaatgacaatcttaataaatattcattgcgattgaatattgatcaagaaattttctcttgggctaaaatgggctttacttctaatctaacttatcaagatagaaatcaaggagtgaaaaatacctttacaaaaggtctttcatcatttcctttgggagatgcttatgatcaaaatgggaaaataaatcatgaatatattacaggacaatattctccattaggtgattttattgaagatcaatatgtgaataatactcgttccacttatttgaatgttagtggttatttggaactgagtccaataaaagattttacttttacaagccgtattaatggtacgctcagtgattctcgtcaaggacaatattggggagatcaatgtaatgctaatagacctagttatgcaggttcacctcatgctgctattactaataagaacgcatggaattatacatgggagaatattctttcttataatactactattgcaaaagatcataatataggtggttctgttattacttcttggaataagaatcaaaatgatagtagcttagctgcagctagtggtcagatggtagatcgttggtcattttggcgattagcatccggcgcatcgcagcatgttgagtctgattttgctcaaacacagaaaatgtcatttgctgttcgtttcaattattcttataaaggtaagtatttgtttacattctcaaatcgttgggatggtgtgtctcagttctcagcagggcataagtgggatagtttccctgctggagcaattgcatggcgtatctctgacgaaccttttatgaatgtggcaaaaaattggttgaataatttaaaattgcgtgtaggatatggtattacaggtaattcgggcggggtggatgcttatggtacaactacacaagcctatgtttataccggtaatggacttactttaaatggtcaaaactcttcttttactcagtatacaggtacttatggtagcaaggatttgggttgggaaaagtcttataactggaatgttggtttggactatggcatattaaacaatcgtgttgatggttctatcgaatggtttaaaacaacaacaaaaggtttgctctttaaacgtactttgcctattactagtggtttgactggttggggatccccattatctatttggcagaatattgctgaaactagtaatcaaggtgtggaagtcaccattaattcacataatataaaaaccaaagattttagttggaataccacactatctgtaacatggagtaaagagaaaatagaaaaattacctgatggtgatttaatttctgaaaatttgtttgtagggcattctataaagtccatctatggctataaatataccggaatttggggtacaaatactcctcaggatattttggatgcttatggtgttaaacccggttttattcagattgaaactttggaaaaagatggtgatggtggagtacacaaatatagtacaaatgaccgtcaagtgttgggacatactaatccggattggattgttggcttgaataatacatttacttataaaaattttgatttgtctgtatttgcaatggctcgttatggtcaaactattaatagtgatttgttgggttattatacggcagaagaaagtgtaacaacaaatcagttggctggagcggattattggacggaaaataaccagggagcttattatcctgctccaggtacaggttcggaacaaagtacggtcatctcagctttaagagtgcgtgatggttcattcataaaagtgaaaaatatcactttaggatatacttttccagttaatatctcacgtaaggctttgatggaaaaatgtcgtatctatgcaactgcatacaatccgtttatttatgtaaaggataaacagttgaagggtacagatccagagacaaacggttcggatgcattccctacttttagacagtttgtgttcggagttaatttaactttctaactttatataggagatatttaaaatgaaaaatatattcagaaaacttactttatattcagtggctttagctgctgtatctttcagctcttgttcgttggaagaaaataatccggcaggctttaccaaggaaaatcttgctacttctattgaagggtatgaaacgttggttaaccagtgttattttgctatggaaagatatttctatggtacggatagttggatgagtttgaccgaaggtgattcagacctttggacctatcaggctaatcaatcaacttcatacacccaatggttttggttctttgcaggagcatctcctaataccacttatacaaataattggtggaatggtacttatgatggagtaggctcttgtaatgaagcaattgcattggccggttatgcaccatataaaacggaagcggaacgaaatgctaaagttgcagaagcccgttttttgcgtgcaatctattattttaatgcggtagagcaatttggtggggtcactatgttgactgaacctgaaacaactttgaattatgctccggaacgtacagatccgctgactatttataaggaagttattattcctgatttagaatatgctgtagaatggttggcagttggtacacatgccactactacggttccaaccaaaaaggcagctttgggatttttggcaaaggcctgtttgcagacttatgaatatggttcgacagaatatttgcaaaaggctttggattcggctaaagaattgattgctgattgtgaatcaggtggtgcaaaatataatgcttatatgtatccgacctatgaagaagtttttaaagaatcgaataattgggaaaataaagaagctttgtggaagcatcgttggtatgctggttctgatggtcatggttctagtaacggtaactataaattaaatcgtaatgatgaatatttcttgtgtaatgtgaataaattcggagcacgtgaagataatcaagaaactcgtttaacttgggagggatgtatttctggcatttttatgcctactcaacatcttttaaatctttatgtgcaggaggacggaacacttgaccctcgattccatgagtcatttactactgaatggaatgcgaataagaattatatttgggatactagtgcggctaatatgtatgataaagatgaatctatagttggtactgaattaaagaagggagatttggcgattaaattcgtaatgcctcaggatgaggattatgctgaggaaaaagcaaatagacatacctcgaattatttaatgattgcttatgatgatgtgtacaatgatcaaaaacataatgtaaatatgcaatataatggtatggaaaatcagttccgttatttttatccatcattgaataagcataatagtagcaattactatgtggccaatgcttctaaaaaacgcaatggcaatttaaatgcgacttttatgatgcgtatggcagaagtttacctgatagctgcagaagctgatattttaatcaatggtggtgcgaatgcaatgggatacattaataaggtacgtgctcgtgcaggggcaaaggcattgacaggtacagctacagttcgtactgttttagatgagagaggacgtgagctttgtggcgaatattgtagattttatgatttgaaacgtaccggcatgtttaagagttcaaattatttggaggaaacacatccggacttggctcagttctttaatcctaattatgcattacgacctatctctacaacatttactgcaactatatctaatggtgctgaatatcaaaatcctggatattgataatttaaaacttttatagtagaataattgtcttgtctctatttgtaaagaggcaagacaattttttttcattccattggattggtagtcgtatatcgatttgttactacctattataattactgtgatgaaattgattatattctatttatattgatttgtatagagttatttgtatggttccttttaatttatgaaaccttaaataaccgattgagattgcttataatcagtagatcttataaataatcggaacatggctttgaattgaagcctcatagtaacactacagtaagtataaattgtgcacgaatggaagttgggggagataattcatggggcttgcctatattagaatcttatcggctaaaatcaggcatttataaatttagatttgtgattcggttaaaaagaaatactaaatgaaagaaaatatattttttatttaacgtatttttataattaatcttgagtacaggagttttttatatgcgtcatttgaatagatatgataaaataaatcttgttaactattataacagaaatgaaaagcatgaaaaaaagtccgaaacaaaattgggaaagtaatatcagacgtactcccattattttagggttatcggcagcattatgtatgccgtctgcattttcttatgcaaatgcaagtgaccctgttgccggtgaattggttcagtctgtccagcaaggacgtactgtcacaggtaaaatcatagatgacacaggggaaccgttaattggtgtatccgtactggtgaaaggtacaacggtgggtacgattaccgattttgacggtaattattctttggaagttccttcaggtaagaatattcttgtcatatcttatataggatataagacacaggatataacggtgggaaaaagcaatcagctgaacattaaaatggaggccgatacgcaggctttggatgaagtagtcgttgtaggttatggcgtgatgaagaaacgtgaccttacaggttctattgcttcagtgaaggcggctgatattgtaaaatcaccggcatctaatgccatggaagcattgcaggggcaggttccgggtttggatattgtacgtaattcaggtaaggctacttcgggtgtaaccattaatattcgcggccagcgttcactgtccgatgtgaaagatgagtttggtaacaatgttgccaatgctccgctgtttatcattgatggtatgcagggaggtgatttctcggatattgctccggctgatattgagtctattgaggtgttgaaggatgcttcttctacggcaatttatggttcacaaggtgctaatggggtaatcattataacaaccaagaaaggtgcgcaaggcaaaacaaagttttcttataatggttattttggtgtaaacgggtgggcgcaatatcctgatatgctgagtggggaagactatatgcaggtgcgtcgtgaagctgctcgtactggcggtcagtggaattctaccgccgatgaccagaaacttttcactgtggaggaatggcaggccattcagaacggtgagtggactgactggatagatgaggtgcttcatacagggcttgttcaaagccatcaggttacagcgtcaggaggtacggaaaagaccaccgcgatgttgtctgccggatattatcaggaaaagggttctttcaaaaatgataaaatggataagtacaacttgcgtatgaacattgagcacaagttaggcaagaccgtaaaagtaggagctactacacaggtcactcattatgcacaagatgagcgtgccgagaatgtgctatggcgcgctgctactaatgcgcctcttggtaaagcatacgatgaagacggtaaagtggtagaatatccattaggaaagaatggacaggtgagtccgttggtggatgaggcatctgaagtggctgcaagacatcatgtgctgaaaacaaatttgatagctaatgggtatttggattttactcctgttgaaggattgactttccgttctaatttaggaaccaattatgctttttatcgtaagcaggattttgaaggggccagttctattgaccgtttgggacagaattcaacgtcactgtccaaaatcaaatcttccgaaaagagttttgtgaattgggataatattatcagttataacaaaaccgtcaaagatcatacttttggtgccactgcattgacttcgtggacacaatccaaatatacatcagtgaatgcgcaaggagagggccaattggttgattcatacttatggcataatctgggtgccaatgacaaaagctcttatgtcattggatcggattatatacagcaccagactttctcgtatgctttgcgcttcaactatagttataaaggccgttatatgttgacggtttctaatcgttgggatggtgactcacgtttgtctaaaggtaataaatgggcaagtttcccttctgtagctgctgcatggcgcattagtgatgaagcgttcatgaagaatgtggaagctctgagcaacttgaagttgcgcttaagttggggtaagacaggtaactcgggtatcatggcctacggaactcagtcgggcttgactccgaaaaccaactctgctttccaggataatggctatacctattatatatacaatgaatatgtaggtaatgagaatgtaggctgggagatgtccaatacctgggatctgggttttgatatcggtttgttcaataaccgtatttcggctgttgtcgatttataccagacaaagactactgatatcctgttgccccgtactttgcctacttctatgggtggtagtaacgcaactccgttcaagatgtatcaaaatatcggtgcaaccatgaaccgtggtatagaaatatcggtaaataccgtcaatgtggataacaaaaactttaaatggaactccactcttacctttgctgccaatcatgaagagattaccgatctgattgatggcaaagacatcattggatcagattcgcatattacgactagtttgttgattggacgtcctttgaaatcattctatcattttattaatgagggaatctggcaggaaaatgaggctgaagaagcagctaaatattttaaagattcaaagaagacacaacccttcaaaccgggtgatatcaaactgagagacttgaatggtgactatattattgatgataaggatgaaacttacctgggtagccagtcaccgaaatggacaggtggattcaacaacaactttagttataagaactttgatttgaacgtatatattatcgctcgttgggggcagatgattgattatgagctgaccggttcttatgatcctcagggaaaaggtaacttccctgcttacttgaactattggacgccggagaatccgtccaatgattttccgcgaccggctcagaccaatttctataactatctgggttatcagactttgaattacattgatggttcgtattggaagatcaagactgtatcactggggtatacattccccaaatcgttgacttcaaaattgggcgtgtccaaacttcgtgcatatgtcaccgccaataatctcttctcttttgccaagaatcatttgattcaggattacgatgcagaacgcggagggtcagcaaaagctccgttgcagcgtcagtttatatttggtttgaatcttgatttctaacagataaaaaagaaataactattatgaaatacggtaaaaaatatatgtttgtagcatgtgctgctctgttattgggcatgcaatcatgtgatttggaggaatacaatcctgccggaagtaccccggataacgtgtacaaagaacaggccggttttgaggcccttgtcaattcggcttatgctttttggggcggtcagttttatggacgtgaagattttgtgttattgctgaacggtggtggcgatctttggatcaatattgccaattgcggttatggtcgtcagatgtctaaatatgaagaattgacggcttcggttggtcagattaagaacacgtggaatcgtctgtatgaaattataaacgactgtaatgccggtttggaacggattgaccaagtggaattcaaagacctcaaatccgcaactacgcgcctaatatgatacagaagcgaaaagaatctgcatcgttagtaaaaagggggcacagtgcatcgaatgtcaccataaagacatataaatgccccttaccccaccatgcgacttgaggcaatacgcaaaatcacgactataagttgtcggtgttatccaaagtcattctggaacacattggcataagcattgttgcatgaatagatattcagcacatacttccttgatgtcctgacccatttggctggcacagagatgaacttaaagacaaacgtcttgatgcggcttgttgctttgagtccgaacctcttcacgtcaagcctcgccatgatgaatttatagaagttgcgtatgagtgccataagcagaagaaacaccgtgttttctcccataaaggattttggaagcctgttccagccgaatccgttattcatatcatcgaagatgcgttccttccctccacggaggttatagaattcgacaatctctttctcggaagactcgtagtcatttgtaaggatgcagcggtaggtgtattctccttcccacaggtcgagttcgccgtctatccgcttctgtctttgaatcacaagacggtatgccttccctttccatttctcgatgagaatggaggccagctcaaactcaatgccgcccaattccactttcttccaacctctgagggcaaagatgtcattgtagagcgaactgcatcggttagcacggatatagaaggtcttgcagtgtttagcaatctcttccactatctcttcagaacacgagccgcaatcagctctgaaacggttgataataagcttgttttgttcaaacctttcaaagaacctcttcagcgtgtccttctggtggaaacggacatttgtgttgccgtcgctgttctcaatgccgacaatcaagttgccaataaccgccacgccagggcgataaccaaggaacttcttgtatgtaggcttcgcatcaaacttctcagcctctatgaactggtggtcgaagtcaacgtcatacccctcgccctctttcagctgccctgtggacaataggcaattgaggagcagtgtattcagcttgtctgccgtgttgaagtcgtaggtcttgccagtgtcggatgtgtaggaaatgttatcctgggtcagttcctttatggctctaagaatcgtgtcggcactgcatgtgcgaagtgtcggatgaagcgaaaggtggtacatcagatgagtggtgacatcctcgatgcatgagccgccacaaaaataaacgctcataagcgaacggatgatttcgctgtattgataaccatacagcctgcatctcataccgagggttgagtcgattacagatgagagtctggagtcaaattgctccattattgaaaatattcctccaaaaggagtgagtttctcggatttaattgctacctttgccatgtctgtcgggtttgatacatattttgatttgcaacactaagataggtgaaaaatctgacatggcaaattcctgagcaactttttgttgctcaggtacttaaaaagttatatttgtaatagtgttgcggaattaaggaaagacaagaaactgagagatatccgttttggtgaattaagtttcatgcgtgcttacgcttattggcatttggttgaaatttacggtaacgtggatcttaggaccaaagaaacttctgccgaaagtctttcaatgaattgttatcgcagcagctatgaagatttatatgatttaatgctgactgatgcgcaaaatgcggtggataatctgcccgttgatccttatcctgttaaagatgtaggtcgtgcgacctcaaaagcagcatatggcttgttagcgcgcatcgcactgacacgggtttcctattgtgacagtcaggcagacaaagataaatattataaaatcgctgaggatgcggctcaatatgtgattgataaccagagcgcattgaaggtgtctttgtataatacacctgccgaagtttttgatccggataataataaaacgaataaagaggctatgttcgttgtgacccactctactgagtcatcattgaatatgcaggctaaaaacccgaaccgtatgcatatgtatttccatgccagttattcggcaagagcaggtatggtacaggattatgaatatggaaatgataagaatgccaagtcgggtagtatggcgatgatgcctacccgttatttattggaattgtataatgaggatatagatgctcgttataatgcttggttccgtgaagagtataaactgaatacaccccaagcttatgcctggactaaggatcagttggactattttgaaaaaccgtcatctatgattggtcaggttattcagccgggagaaacagcgctacttttcaccaagaagaagattgctggcaaacgtaacttgccatatgctgtcgtcgatattgatgatacctatgcagccgatggaagtgtcagcaagagtgccaactttaacattcacttcccgacattgctaaagtacgaagatgcgaattttgaaaacaaaggcttgcctaccaattcgcaggtaggtgcaaatgatgtgattaccatgcgtttgcccgaaatgtatttcattgttgccgaatgtgagataatgaagtccggaggaaataaggagatagctaaagcacgtatcaatgacatacgcagacgtgcggctgtaccgggcaaggaagctgaaatggaggtaggagtggacaagatgacgatcgactttattttggaagaaagagcacgtgagtattgcggcgaattcatgcgctggtttgatttgaaaagaaccggaaaattagtagaatatgtgaaagctcataatccggacattccattgattcaaccgcatcatgcatggcgtcctattcctcagatgtttctggattctatcttgaatccggatgaatttggtcagaacgagggatataattaataagcatgaaaacgatggcgctttttaaatatattgtcctgtctgtctgtttgtgtggaattcatctgaatggttttgctcagtccacccgtgaggctatattggaagatatagcccggacgggaggagtgtactatgcttatcccgtaaaggaagctatcgcgactcctccgcctaaagggtataaaccgttttatatcagtcattatgcacgacacggttcaaggtggattcaatcggaacaggattataaaacagtggttgatattttcgagaaggcacatcaagctggagttttgaccgctttgggagaagatgttcgcaaaagaatggcgttggtgtgggaagatgccgagggacatgggggagatttgacccctttgggtgtgaggcaacaccgggggatagccgaaagaatgtttcagaactatcccgaggtattcaagggatctcctgctctgtctgcacgctctaccgtggtgttgcgatgtgtattgagtatggatgccttttgtgaacggttgaaagaactcaatccggcattgcagatccggcgcgaagcttgtgccaggtatatgaaatatatgaattatcatacgccggaagccgtgaagtttgtttctcatcagggaccttggtatgaggaatatagaaagtttaaagaaagccatactcgtcccgatcgtttggtcacttctttatttaatagtcctgactatatccgtaagaatgtgaatcctgatgaattgatgtggggactttattggattgcttcagatttgcagaatgtagagatagaggtgagtctttatgatgtatttcaggaagatgaattatttgatctttggcaagtttgcaattatcataattatgtatgtgacggacctgcacctgccaatggtggaataatgacggccagtgcccggtcattgcttgaaaatatattggattcggccgatgaggcaatcaggtccgggacccatacagcgacattacgctttgggcacgatggaaatatcattcccttggtagcgttgctccaattgggcgatatgtggaaagccgaaacggatcccgataaattttatcaggcatggtgtaatttcaaggtcactccgatggcggcaaacgttcagttggttttcttcagaaaaaaagcttctgacgatatattggtgaagttcatgcattgcgagaaagaagttaccatccctgtagaaacggatattgctcctttctaccattggaaagatgttgaaacatattatcgtcatcttttgcataaattgccataagtctataagatgaaaaacggtgtaaattcctgtagtattgtaacggcgggatttataccgtttttttgaatgagaaagagcaaagggaacagcagattatcaaagaaaagacttacttttgcaataacagaataaataaagaataaaagaccatgagtaaactgaatatgaaagagtggataaacgaaattatccaaaagaaagaagtggtggctatgcccatcatgacccatccgggcatagagatgatagggaaaacggtgcgtgatgcggttactgacggacaagtgcattacaacgccatcaaggcattgagtgagaaatatcccacagccgccgcaaccgtgattatggatttgacggtagaagccgaggctttcggagcggagattgtcttccccgaaaatgaggttcccagtgtagtggggcgtcttcttgctaatgaggaggatattgaaaaactgaacattcctgctttgaataaaggaagagtcccccagtatctgaaagcaaatatgttggcagccaagacaataacggacagacctgtctttgccggttgcatcggcccttactcattggcaggacgtttgtatgatatgtctgaaatcatgatgcttatttatatcaatccggaagcggcgaattcgttgttgaagaaatgttcggatttcattctccgttactgtatggcactgaaggctacaggggtgaatggggtagtgatggccgagccggctgccggactcttgtctgatgaggactgccggcaatactcgtctgttttcattaaggagatagtagagaaagtgcaagacgatcacttcacagtcattctgcataattgtggaaataccggtcattgtactaaggcaatggtagctacaggagctgccgcttatcattttggaaataaaatagatatggtcgaagctctgaaagaagtacctgcggatgctcttgcaatgggaaatcttgatccggtgagtttgttcaaggcggctactccggaggtgatgaagaaagccacactcgacctgttggaggctaccaagtcctatcccaacttcgtgctctccagcggatgtgatacaccgcctcatacaccttctgaaaatattgatgcattctttgccgcattaaatgaattcaataatgcttgaaaaagaactttcttttgctgatctgcctatctcattgtccgaaatctatgagacgatgggatatgcagatgctgtacccgacgaagcagtagaaaaagaagtccgtggggtgcttggacgggttgaggcagtaacttctccccgtttttgttttttcatatccggtggagatttggatgaaacaaaagatttgcttactgtcggtaaaactagtttcagtataggtaaaataataacccggcaactgcgtggttcggaatccttcgctttctttgccgcgactgccggaactggttttgaaaagttccagcatacgttgcaacaagagggggatatggtaaaggtttatatagcggatgccataggaagtatcatagccgagaagactgcggattgtatggaaattgcattggatgaatacattcacgacagagggtggaggcatacgaatcgtttcagtcccggatattgcggctggcatgtgtcggagcaaaagaaattatttcccttatttccttcagcggaaccttgtggcatccgggtgacagattccagtttgatgcttcctataaaatcggtcagtggagtaataggactgggggatagtgtccgtaaactggaatatacttgcggtctctgtacgtacgatagatgttacaggcggaagcagcggggataataggatggttacaaaaatcagagtcccaaatggctagatgttgttattaatcttattgattttacaatttgttgcaatcttaatgaatctcctgtcctatcaagacaggttataacagctgtccccatctgctgtaacaactactttcatctgatgttccaccctggtgaaactccagtcccaccggggtggaactgcaatttcaccggggtgggactgcctcactacccgagtggaataccaaacgtaggcatataaaaatacaatcttttcagccttctgcaccttcttttaatgcccattgaagaatagataaagcccgatcatgataatagtcagtagcgtccatgcaaggataaccgatttggccggtttctccatgactttcttcatgtttaatgtacattcttgccggcgtttatccaataaggataccaaaatcatgcctgcgctgatgacaacgaacaggtagaaagacagcatcatgaagtgaggccatgctgtatatttttctgcaggaaatacccataaatagagaatgcccactcccatgctgaacgccgtaccaaatgtcaatgccatgttggcagccatcgtggtagttcgtttccagaagatgccgaacaggaaaacagccgccataggcggtgcgataaatcccagtaccgattggaatacattaaacagattcaatcctttgatactgtctatggcaatggtgatgatcaccgaaatcagtgctcccgccattgtaaccacatgccctgtacggatgatctctttctggctggcaagcggtctgaatttcttgacatagatatccatcgtgaagacggtactcagcgcattcagggcagagccgacagtgctgatcagtgcggcggtcaatacggcgagtaccaaccccaccatgcctacaggaaataagttagtgaccatagtcatgtaggcttcatcggggttcttcaagcccgggtagagtgccagacagatgatacccggaaggatatagagaggaacatccagtatcttcaaccagccggtgaagttggcacccatttggccttctttcagattcttagcagccaatacaggctgtaccatggattggtctgtgcaccagaaccagactcccatgatgggataccccagaataatgggcagccacgggaaggcgggatcgtcattcgggcggaacaggttccagtaatcggccggaaccgcttcggccaatgcgctgacgccacccactttgtaaagacctgctatagtaagcgtggccgatacgaaaataagcagaagcatttggaatacattggtataggctaccgctttcagccctccggccatggtgaagaatgcggagataacgagcaggattaatgctgactgccacatgggaatatcgaaaacctgacggataaggatacctccggcgaataaggtcagggcaagccacgagataaggattgtcacaatggtgtaccaggcaagaatgttgcgggtggactgtccgaaacgccgccccatgaactccggcaaggtggtgatacgtgctcctaagtaacgaggggcaaagacaaaagccagcaagcagatgaaaacaaacgcataccaggcataattacctgaaacgataccggtggtaaatccggcactggcggaggctatcagcatggaagggcccacattggttccccacatggagaaaccgatgtgatgccacttcagggaacactcggcaagaaaaaggctactgccttttttgcgtttcagactggcccatatgccgatgcctataagaatcagaaagtaggcaataagaatgccccaatctaatgtatctaaataattagcgtgcataattcatgtatcagattaagatgaatattccgtttatttatgaagccccatcagttccttggctaccgctacggccgtattggcattgtcgctatacccgtccgcacctatttcatcagcgaatccctggcttacgggagcgccgcctatcatcactttcacttgattacggataccggctgcttccagggcgttgatgacatcctgcatataagtcatggttgttgtcagcaaggcgctcatacacaagatatctgccttgtttttcttgacctcttccacgaacttgtcacaagatacgtcgatacctatgttaatgacttcaaagccgcaaccttcaagcatggatgccaccaggtttttaccgatatcatgtagatcacctttgacagttccgatgactaccttgcctatggtagttgctgcacttccctgcaataaaggtttcagaagttccaaagctcccttcatggcgcgtcctgccatcagcagttggggaacaaatgcttttccatcttggaagcgttgtcctacttcccccatagcttttatcatgtaattattgataatttcttggggttgtatgccttcggctatggcctttttggttacttctacggccggttccagctttccgtccacaatggcgttgaacaaaggttttagagcttcatcttcggcggcttcgggacttttgattataattgtttcttgtttcgttgcagcggcttcctctttcgaaaggctttctttggatgcggcaggtgatgaaaaggagtattcctcgacaatacgcatagcttgttccacttcttgttcattatgaaaatccatttccagatgtacaccgtccgctccaatgttgtccaataaaggtttcagttcatccaaagttacccaacatgccatgatactctttccaccggcaaggattttcttgtaaaggtcataccatttaggtgatcctccttgtggctcacctacgcccggagtccattgaatggcattcagttcctcaatttcaagaagggcaggcagatgatgcatggcgcccacaccgtccagatgatacagggtatagtctatcttttggcattgttcgcggatgaacggttgcacgaagcgacgataatcatcctcactgatcatggtggagatatcgctttgaagcttgctcatctttcccggtgcccatgaagagaaatagcagaaggccatttcgtccccttcacggatgatatcgtaaagttcatcgaacaccttgaagtagatgtcattaatctgttgcatctgctgttccagtacttcgggttgcattacagtatccagcaacactttatccgtacctttcagtgcggccaacacatccaggccttccatcagatcgggcattcctacgtaataatgaccgtttgccttcgctttgcatgctttcagtaattccttatgcagaatccagttagggtgctcgggattgaaaacaattttatcgttgaaatccggatcaggatgaatccagattgtatcttctcctccttcgaatacgcctcctaaaatagctgccagtgaaccggggcctaactgggtattggcaaccggcaggatatctgctttcaggctgctgtgcgctacgtaccaatccagatattctgcacgccattgtgggtcgaaccatttttgattcaaatctttcgccggagccggtgctggaatatctgcgtggggcttcactctcttttggaagtgttcccacatattcagtatgattcctttatgattccaccaatctatatatcgcttttttgtttcttctaaatttgttttccaagtttccatgttcgttagtctttaaatattcctttaaaatgattgtcaatgtgcaattcagcgctcttacttaaatccatctcatccgtacactccacctcatccgggtaaacaggaatagtcgctccctgacgtacatatacgggcatttcgtccaaggggacatccaggtcttttaaccaacgtcctccttccagcacttcaccggtgaagaaattcacccattgtccttcgggcagatagacgtcacggcggttttcactgttcatgaccggagctaccaggaagtcgttaccgaaatagtactcatcgtcgatgtgccagcacagcttgtcttcagggtgatgaaaaatcagagcttgcaagagaggtgctccgcttgagatagctttccggctttgtgctataatataaggtataagtgtatagcgtaatttccaccatttttttattatcggagcaatagccggataatgccacggctcacgtttgtttgttccgtgatagcggatgtgtgaggagaatacgccgaattgtgtccagcgcatgtatacatcatcggctactacagagttcatgaagttaggtaatgtatggaatcccggaacatcatggctccagaatgcaaatccggagagtccgaaatgtaagccacctttcagtgagcctgccatcccatcccatgaactgcatgagtcacctccccaatgcagcggatagcgctggcatcctgcccatgccgagcgtgcccatacaatgccgtcaccggtaacgtcttttgtgatttcataagcggctttctgataaagcaatgcatacaggttgttcagcaattcgggtttcatgcctttatagagggcatccatgtggatgttttctccaaaatcggttttgatacaggtcacgcccatatccagcagattcttcagcagtcctttataccattcggttgctttgggataagtgaagtcaatggttccggcatagtccaaagcggagaaattggaaccttctgaatcttgtttctttgtcagcggagctatataatcgtttttgcgtgcttcgtctatctgttcggcgttttcggccacgtaggggagttgccatagggatacgcggtatccttttttcttcaggccttggatgaaccctttgggatcgggaaagcgttcttcgttgaatttccattcgcacagccagtcggtcttgaaccagccggtgtccaggtggattacatcgcaggggtaatgctcggcacgcatccggtcgcatatctcattaacctcatcagcactgaaataagtcatgcggctcatccagatgccgaagctccagaggggaggcatagaaggatatccggtcagatcccgatagccccggaggatttcttccatagtattacctgttatgatgaagacgtccagcatggcctggtcgcttaggaactgtaccgagcgggtggattgcccggccagtgacagtttgctgtgggcacaggtgtgatagaatgttccatacatccggctggagaggtagaaagggatatttttataggtgcggcggttgttcacgccttggccatcctggttctttaagaagaaagtttgtccgcttaagtccattttggcaaagcgttcccctgttccggcaaaacattcatcagattttgattcaaaggaaagggtggcacgttctttcactccgtttcgtttgcagaaagccaatggcagcgcatcgtaacggggaggggagaagtggtcgtaggcagccaggcggatttcacgtttgccgtcagggtaaaggcgaagatccaatgtttcttgaggatcgggcaggagttcgctccaacggtctaataccggaggctttatattgataagtgcccgttgtattccgtcttgggtggagataatccattcaccttctacttgtgttacttgcaaagggagtttctttacccggtcactgaattggagcatttccgactgatccgtcatgctttcttcaccgaatccgataaagagccgggtgatgcctgaggtatattgacggatgaccagcgtatattcttcacgggggaatgcagtatcgggtgccatatcgttagagagcacttgcttttgaaaagggacgtttatacagatatccccgtctttttcatagacagaggtgggtttgtatgctttccataatgattcgtctcttgacagatcgggatcaaagtccagaaaatcgaataagtggtaattggttggtttcattctttttttgttattttgtttttataatgattttcggttgttttcctttgctgtaggggaggactcaatgtgcccatccggtggcataagggggattcaaggcgaccctgcctgccttttgttttatactttcatctacttgcggaccattcttcttccacacattatgagggcccggacggttgaagtcgaaacgttcggacggacaccagttgttttctacggtatagccatccgtcgcttcatcaaagtagatgtaaaacgcacggtcgttggtagcgtatggcgcgtcgattaaatgttcaatccggttattgcgcatcacggagccgggttggttggagagggtataaagtcctcctgcatcatacagcctccgggcaaagtggtggacgtaattggcttcaatccgattgcccctcattccgctttccagcagggtccatccccagcccacacagatacctgaataattgacgtggcagacttcattatgtatgatatggatattctttacatatccggctccgatgcctacacctccccaatcttcattggtcacttcctcaatcaggttgttccgtatggtgattcccgtacataattcctgttcatgaaaaggtgtataaggcacatgggtttcaaatccttcatcgggaaaggtgcccaccagtaaggctgttccaccaatatcggtgaaatggcaattctcgacaatggaagccgatacggcgcgttcataatctactcccgtagctgccaagtgctgaaatgtgcaatggttgaaattgatgttattaccgcattttatctgtattgcagctttgggtctgcctatccatgcctggttttccagttccgctttttcaggcagccccggtatgggtagtttgtaagcatccagcagatggaaacctccttgcaatgtaacgtgtccttgataagaggggcgcatccatgaagtatgttcgaaagatatattttgaaaatgtatgttccttaccggacgttccaaagtgccgtttaccgttagcaaggtttctaaagccgggataatgacttgcgccttcgtcatgtcttcgtgaggacgcgggtaataatagatgcgtccggaaggataatcctgataccattctccgggctggtccaataactccaaagcgttgaccagacaaaaggaggagtttcctttttctccgtcaatgacaggttgaggccagggatgggcaaactccaaccggctttcgggatcatgaaaacggacaactgtttttgctccttcagtaatcatttccttcactctcagtatggcgatggcccaacgttggtgaacgatcatctctacttgtgaagcggtatttaaccctgctgtttgtggagtgggaatggtgatcgtctcttcctcagggttaaaatcaatcatgcgttccattactccgtcgggaaactgtgcggcccgctgtgcttttgctccgttgacccacatttgtcgggtttccaatatcctgtttcccatacggggcgcttccgctacccatattttatttctaagtgtttttggtattctggtatcttcgcatccttgttcccaacctgtcacaggaactccgccacttaagactacatgggcattgggaacagtggtgatacgagtgggagagtctgttgtcccgctatcttcggggcggatgaacaggcttttatattgtgggtatattccttcctccaataggatatttatgcctccggttgtttcgggtgattgcaatctcctccattcgcgcgcttgcttgatggcttgttccagagtctggaggggagattggcgtgtaccggcagctttgtcgttaccgtaaggagaaacataaatatctcctgcggttaaataaaaggtataactgataaatgcgataaagcagatcatttttgttttcatgggttctccggatttaaaggtctttttaagcagacggaaggaatctgtttttgtacccattggataatttgctaatgtgtcaatttgctgcattctactctacgtggtaatgggcatattagcaaattgatgcattgacatattgattgaagtataataaaaaaacaggccataccttaatgaaaaggtacagcctgcgtcatttaataaaaaagatttattttttatgagttcatgctcatcaggaattcttcgttgtctttggtattttccaaacggctttttacaaaatccattgcttcgataggattcatatctgccagatatttgcggagaatccacatacggtccaaagtagtcttgtcgagcagcaagtcgtcgcggcgggtgcttgatgccacgatgtttactgccgggaagatacgtttgttgctcaagttgcggtccagctggagttccatattacctgtacccttgaattcttcgaagattacttcatccatcttggaaccggtgtcaatcagtgcggttgcgataatggtcagcgagccaccgttttcaatgttacgggcagcaccgaagaaacgtttgggcttatgcagggcatttgcatccacaccaccggataataccttgccggaagcaggagaaaccgtattgtatgcacgtgccagtcgggtgatagagtcgaggaagattaccacatcgtgaccacattctaccatgcgtttcgctttttccagtacgatacctgcaatctttacgtgacgttctgccggttcgtcaaatgtagaagcgatcacttcggcatttacgctgcgcgccatatctgtcacttcttcgggacgttcgtcaataagcagcatgatcatgtacgtttccggatggttggctgctattgcgttagcgatgtctttcatcaggatcgtcttaccggttttgggctgcgccacaatcaaagcacgctgtcctttaccgataggtgagaacatatctaccacacgggctgaaaggttgtcactatatcctcctttgcaaagtttgaacttttcatcggggaacagcggggtcaggtgatcaaacggaacgcggtcacgtaccaatccgggatccagaccgtttatcttttccacctttaccaacgggaaatatttttctccttctttcggcggacggatagagccttccactacatcaccggtcttcaaaccgaacagttttatttgcgattgtgaaacgtaaatatcatcgggtgaggaaagatagttgtaatcggatgaacggaggaagccgtatccgtcgggcatgatttccaataccccggtaccggtcaggataccttcaaattcgtaaggcttttccacctgtttgcgttccggttgttgaggaatgctggcagacgcttctccctcagccgtcgtattgttattattgtttgcctgacgaggattgttgtaattgttgttgcgcggattgttatacttctgattttgatcgcgctgctggcgtggttggaatttgggggcaggtgtctgtaccggagccggtgtttctactttggtagcctcaaatttgccgaacaactcagtaggaagttctattttttctgaaggaagatcctcgataggaataaaatcatcggtttcactgccgaattccagttcgggaagaatcacttctttttcttcgggaatagccggtgtttcttctttttttgcttttttgggtgtcggtttcgccggtgcttcagctttcacttcctcttttgcggtttctttcgtttccgttgcaggttgttcttctgtcttggctgttactttcttactacccggtttgcgtcctctttttttaggtgttttttcttccgtgcttgtttcggccacggtttctgtttgtggtgttaccgctacaggagcagtttcttttactgtttcggcagctgtggcggcaggttgcggggtattggcttccagcttctgtgccttgtccttggttgcagtatagaccttgtcaccgtcttttttaacgttgatacgtgatcttttacggggttgactttcattggctttttctgccgctacttttttggttgctccgactatggcttgctcgtccagaattttataaaccagatcttctttttttagagagtctgttttcttgatacccaactctttggcaatcgattgtaattccgacaagtctttgtcgtttaattgaataatgttatacatagagtatagttattagtaatatatttctttataatcttttaatggtataattaaggagcgcaatctacacgaaaatgtgttagaagggggaaatgcactcataattacgattatgggattgatgttgttttgattgttatcaggaagtaaacagactttcccggatagggaactgacgtatttaccgaggacaaaagtagatatttttttttaatctcatgcatattacagaagattttttgccgaatttaatgaaattaataaaaaaaacgacgtttggaaacatcctttctgtctgtgaaaaccctgatgttaaatgaacgtaaaaatagatcagattgttcagcagagtctgcatgaaatagcgaaaaaaatactaatttagcccgtcaaatttgatttttacttaattataaatagaaaaaagatgaaaaaagtgatttttacggaaaaggctcctgctgctataggtccttacagtcaagctgttgaagtgaatggtatggtattcttgtcaggtcagattcctgttgatcctgctaccggtgaatttgttccgggaggagtgactgaacagactattcaggtttttgagaatatcaagaatgtattggcagaagctggtctgactactgctaatatcgtaaaaacaaccgtatttttggcagatatgtctttgtttgctgaaatgaacgctgtttatgccaagtatttcgaaggagatttccctgcccgttctgctgtagctgttaaggctttgccgaaaggagcgcttgtggagatagagagcatcgcagtgagataatgagcttttcgtcaccgattgcacggattgatgcagattatttctattgaaaagcaatcgcttggtatggaacctgtgtcaatcagtgtagtctgtagtgaatgatggtggatggggaatcataaaaacaactgattaacagatagcgtagaaaagtggaatatgaaacaactggacaagtggcaatggtccacattaatattatctgctatactggtaatggcattttcagtctttatttatcggtatgaaccttttaaatccgggttcgagattaccgaccagctgggtggtaatattttccctgcaaccattctttctaccgcaaccacagatgccagtttaatcgtacctgccgattccgattatatcggaaatcccaagtcgtgtatcgccattcggctgaagaacagttatgccaatagcaaattgcgtatagaagtggccgagactccttttttctctcagtctgtatctgagtttattttacccaaggcggggaaagaatatctggttttcccggatattatatggaactatcaggctttgcgtgataataatcaggcagtgcccgttagcatctccgtcaaggcggaattgaataagaaagaacttccacagcgtttgaaaaccatctcgatgcgcagtatcaatgagtgccctttaggatatgtggacgataaaatgaagtttcacgatacgggagagttttttgcggcctacgttaacgaggagcatcctcagattgacaaattattgcgtgaagccttggatacacgtatcgtcaatcgttttcttgggtatcaaggtaatgcacaccagtcggagaatgtggacaaacaggtctatgcattgtggaatgtgttgcaaaagcggaactttaagtatagctccaccaccaataccagtctttcgtccaatgtggtttatacacagcgcgtccgtaccttggacgatgcgctggaatcctcgcagataaactgtgtggatggcagcgtgttgctggcttcactgatgaaagccatcaatatcaatcctattctggtgcgtattccgggacatatgtttgtgggttattacacagacaaatcacacaagaatatgaattttctggaaaccacgatgataggagatgtgaatctggatgatttctttccggatgagaagctggattctaccatggtgggcaaatcccagaaccagatgtcgaaactgacctacgagaaatcaaaggaatacgctacgaggaaataccgggagaatgactccctgatacattcgggtaaagtgaattatatgtttctggaaattgataaaaagacccgtgcgcaggtacaacctatcggtaaataaatttgttgtatggatatggaacttacttatatatatcatagcggattcgccttgtcaggcgatggcttcactgtaatcatggattattaccgtgattcggaggatggacaggcgcagtcggatttgaaccggctgatggatgggactttcagcaatcaagaggccggaatgccggaaggaatcgtacacagcgaattattgcggagacccggaaaactgtatgtgctggccagtcattttcatccggatcattttaataaagaggtattgcaatggcgtgaacagcggccggatatcatctatattttctcgaaagacattttgcgccatcgcagggcgcagaaagaagatgccgtctggctgaaaaaaggagaggaatataaggatgaaacattgagcgtgcgtgctttcggttccacggatgtaggagtatcgtttttgcttcaggcaggtggaaaaaagatttttcatgccggtgatttgaataactggcattggatggatgagagtaccgaggcggagtggaagggggccgagaagaatttcctgcatgagctggatgatctttacgcctatacgcccgaagtggatgtggccatgtttcccgttgatccccgtttgggaaaagaatacatgcggggtgccggacagtttgtaacaaagataaaaactcatatctttgtacccatgcatttcacaccggagtatgccaaggcaaatgctttctgcgactttgccgaagcgcatggagtgcgttttgtgtcattgacgcatcgcggacaaaaaatagagattgaataacaaaagaataacacaatatgaaagtaaaaggaagatttgatcatttcaatatcaatgtaactgatctggacaagagtatcaagttttatgaaacagcattaggtttgcatgagtctcatcgtaaggaagcttcggacggttccttcgtgctggtgtatatggccgatgaccacagcaatttcttgttggaactgacttggttgcgtgatcatacccagccatacgagttgggtgagaacgaaagccatctgtgtctgcgtgtggaaggtgattatgacgaagttcgtaaattccataaggaaatgggatgtgtttgcttcgagaacaccgctatgggcttgtatttcatcaatgatcctgatgattactggattgagatattgccggtgaagtaaaacaatcgtttccgttagtaatgaattaaaaagatagagactatgaaatacatttctcccggtggctggttctcattggaatacccgatgggctggcacgagtttgaagatacagaagagagttttttattctataaccctgaccggtggacaggtaatttccgcatatcggcttataaggatgaagcagctgactatggtccgcagtgcatcgcatacgaattgaaagaaaatacctcttccgccctggtgaaagtgggcaagtgggattgtgcttacagcgcggaaacttttcaggaaggaggcgcctggtacaccactcatatctggatgacaggagaggagaatctctctttcgaatgttcttttaccgtgtccaaaggaggagacaagcatccggcagaagaaatcatccggtctttacagatccgcaaagaaggtgtaagtcacccgcgtgagatcattccgatccgtgttttggaaatcggggaggtgaacaccgcctttgagtgggcttctaccgcgattaaaaagcaactcaccaaggattttactgcgtctgagagcgatattgacagtatacagcaagtaatggacagcggacgtttccagacccagcagcgtatggcgtgggagaatttcggtattgccttcggagccattctggtgaatgagatggagggtatggaatgggtgactgtcattgagggacagaaagaatatcccgccttgcagtttatgtgttcggatatggtgctggaccctgccgcactggtgtggggaaaagctaaaaagggactcccctgcgacttgaaatctgaattcaggaaaattaagcgagaggcggaggcagtgttggatgatttaaataaatagacaaataatgaccccatatatgcaagtagacgggcttaccaaatcattcggtgacttggtattgttccggaagatttcatttggagtggccgaaggacaacgcatcggtctgatagcaaagaacggtacaggcaagactaccttacttaatataatagccggtaaggagggatatgatgaaggaagcatcgtctttcgtcgtgatctgcgggtgggctatttggagcaagacccacattatcccgaagacctgaccgtgctcgaagcctgtttctatcacggaaacagcacggtggaactcatcaaagaatatgaaagctgcatggaaaccgaaggcaatccgggactggaagagctgttggcacggatggagcacgaaaaggcatgggattatgaacggaaggcgaaacaaatcctttctcaattaaaaatccgggatttcagccagcagatcaaacatctttccggaggtcagttgaaacgggtggctttggcgaatgtgctgataaccgagcccgatttcctgattttggacgagcctaccaaccatcttgatctggatatgacagagtggctggaggggtatctcggccggggaaacatcagtctgcttatggtgacgcacgaccgttatttcctggaccgcgtctgctctgaaattatcgagatagacaatcagcaggtttattcatataaagggaactatagctattacttggaaaagaggcaggagcgtatcgaggcgaccaatgccgaaatagcccgtgccaataacctgtaccgcacagagctggagtggatgcgccgtatgcctcaggcacgcggacataaagcgcgttatcgggaagaagctttctacgaactggagaaagtggcgaagcagcgtttcaacgatggcaatgtgaaactggatatgaaagcctcttacatcggctccaagatttttgaggcagatcatctgtacaagcgtttcggtgatttgaagattctggaagatttctcgtatatctttgcccgttatgagaagatgggcatcgtgggaaacaatggtacgggaaagtccacattcattaaaatattgatgggcgaacagaagccggacagtggaacactggatatcggtgagacagtccgtttcggatactattctcaggacggcctgaagtttgacgagcaaatgaaggtcatcgacgtggtgcaggatattgccgaagtcatcgagctgggaaatggcaagaaactgaccgcatcccagttcctgcaacattttctgtttacccccgaaacacagcatagttatgtatataaactgagtgggggagaacgtcgtcgcctgtacctatgtacggtgctgatgcgtaatcccaacttcctggtgctggatgagcctaccaacgatctcgatatcatcacccttcaggttttggaagaatatttgcagaacttcaagggctgtgtaatcgtagtaagccacgaccgttatttcatggacaagatggtagatcatttgctggtattcaagggacagggagacattcgtgattttccgggtaactactccgattatcgtgactggcgcgaggcgaaagagcagcgcgagaaagaggcggagaagccgaaggaggaaaagaccgcccgcgtgcgcttgaatgacaagcggaaaatgtctttcaaggaaaagaaagagttcgagcagctggaacaagaaatagccgggctggagcaggagaaggccgatatagaagccgccctttgcagcggtacgctgggagtggaggaactgacggagaaatccaaacggttgccggaactgaatgatttgattgatgaaaagaccatgcgctggttggaactgagcgagatagaagggtagaataaccggaggtgcaacagtgtacctgatgccatattgctatattcgttttgaataacaaaaccataatatagaaaagaaatatggcatccattaaattgaaattccgcccatcgagcgtaaaaggaaaaaagggcgtattaagttatcaaattattcattacagactgacacggctcatcaagacttcttatcggatcatgccttccgagtggaacgactccaccggcagtctgcttatttcaacacagtctgaatgtaaagcgcgtcttctgctgatacgtgaccagacgaattgggagatgacgaggttacaaggtattatcaatgatctggagcggaccggtgtggaatacaccattgatgatatcgtggcttctttccggaaaatcccttctgtagagagtgtgttcaacttcatgcaacgatgtatcaataaactggagcggcagaaaaggggacggacggcagaaggctatacctcgacaatgaacagctttatccaattcagaaagaatgaggatctgagttttgaagcctttgattcggagctgatggagatgtatgaagcctatctgaaagagaagggcttggtaaagaacagtacttcctattatatgagaatctggcggagtgtgtataacctggctgtagagcaaggctataccaccgacaagaaacctttcaaacatgtctataccggcatagacaagaccgtaaaacgggccgttccttttaaaatcatcaaaatgatcaaggagcttgatttgtcattcgaaccccagttggagctggcaagggatattttccttttcagtttctatacccggggcatgtcgtttattgatatggcacacttgaagaagagcaacctccagaatggaattctgacatacagccggaaaaagaccgggcagcggctgactattctgtgggaggagctgatgcaggagattgtggataaatacaaggatgacagttccgagtacctgctgcctatcttgcggtattgtgacataaatgaccgcaagcaatataaactgagggccaagcagataggacggggcttgaataaaataggcttgcggctggaattaaaggcgccgttgactttctatgtggcgcgccatagctgggccagcatagcgcaggacagaaaggtgtctacagacatcatccgcgaagggctggggcacgataatgaaaagaccactcatatttatctggcatccatttccacttcacagatagatagagccaatcagattattttaagagggttgtaggggaagtttcattcaggctgtcatttacagcctgaatattttattggtttggataaaatcagatcatttttggagaaatatttttaaaatcctaacataagagctgggggaatattcaatattcggcaaagtaatcaaaatatgccttgttggtgatagatacaaaatattgaatgattttgtatggggagatatagaaatatgcagaatgctgatctaaaggattgtacaattcggaaatactgtgtgccttcgtgtgatatctaatttgggataatttattttttatcatgaacaagtgtgataaatctgaatatcagctgtttgatagcatgattcgttttataaaaaatggggttctcttactaagagaaccccatttggctgcaaaagtagctataattcccaagaaatggaaatcttttgttgttttaaaatgcttttaacaagaaatgtatgagaattattcgtaaaaggttatgaattacgatgtgtatgtttcacattatcaataaattaaatataaatggggttctcttagtaagagaaccccaaaaatgaagcttcaacaagccttcattttagaagtataaatgataaataatttatgttttgatgcaaatctgtaacgatgcggatttgggtactgaatactcctttccgcagaatcaaaacataacgggtaaagcgcctaggttactgccatgcagttcaatcgcttcctgcccagaccaggggtcagatctgataaccacgtcacagatgggggaagaaaaaaaatatcctgaccacaagtggtattatatgttcctgcgcaacagagagctgaaacgctatatcgaaatctttaccggcaggagggctgtgatgattaatacccggtctggcatgaaggaagaaagatatttctgcttcaaagtgttttcatatacctctgctgaccataaaagacgttttgaacggtgtccttatagcaaggaagaatatgcggcccgtcgggagtccgcctttgctgtaaaggaggctttcgcgacaggctctgtacagaagttgaacgctttgacggatgaaaaggaaattacgggggatggttatctgtttgtgtgtgctccgttagataagttgaatctcatccttgccaatctgttcccccggcaatatcttgcaaaagaccgcaattcctatagcgtggctgttattccccatagacagatggaggaatttatttatctgtatgaatccatgccttataacattgaactgatggataagcctcttgaggagtatattcagaaaaagcagaagatacgtattacgggtggtgtctttcaagggaaggaggggtgcatcatgcgtttgcatcggaatacaaagctggtgtttgcttttggtaatatgacggtggctattagttatcttcaggcttttccgtttgagaagattgaatgattttgctataattcgatcagaattatttttgtctaaaacttaatttaaggtacagtaaagtgccctttcaaaggaatatacccataaggagtgcttacccaattcttgatttgtttaagaggaaaatctcgaaaagaaactttccataacgatacgtcaaaattggatgcttacgcgatagttgtttaaatatatgaatattcaaggtgtaaagaataaagtcaatacttatttcacaaaagggaatgaacgcagtgtgatggtaaagaggaatattgccgtttcactggtaatgaaatgtattagtatcctgatttcacttcaagttgttccattaactatcggttatgttaattctacgaaatatggcatttggctaacgctgagttctattattgcttggctttcctattttgatttgggatttgcacatggctttcgtaaccgttttgccgaggcaagggcaaagaacaatatgaaattagcgagggaatatgttagtactacttatgcagtattgtcttttttgttttctgttattttgttgatagctttaattataaataaatatttaaactggagctttgtcttgaatatagatattatgtataatggagaactgcatgtcgtttttggattattagcttgcttcttttgcttgaatattatagcaagtgtctttaccaccatgttgactgctgatcagaaacctgcattagcttcacttattcagacgactgggcaggtattggcttttggctgtatttatgtgttaacaaaaacaacttcgggaagtttgagtgctttggccgtagctttttcaggtgtgccttgcttgttattggtttttgtttcttttattgcgttttgtagcaaaaggtatagggaggtggcacctgcaatacaatatgtccgtttttcattgactaaaaagattttgggattaggagggcagttttttgttattatgatttccatgttgtttatctttcagtttattaatattattttgtctagattggaaggaccggaagcggtgacgcagtataatatagcatataaatattttaatgtacttcatatgatatttgttattatattgactcctttttggtctgcatttacagatgcatatgtgaaaaaagattatagttggatgagaggaatagtgaagaaattggaatgggtatggttcttatgtattcctgttctgttcctaatgttgttgtgttcagatattctatatcaatggtggattggtgattcggtttctgttcctttttcactttctgttactatggctgtttatgtcctctttcagacaggtggaggtatctatatgactttaataaatgggatgagtaaggttcgtttgcaattaattatttatttatgtttttcctttacagctattccaatactgaatttatgttgtatgatatacggtgtgagtggaatattgttgtttccgattcttgtatttatgctacagatggtgttgggaaagatacagttaactaagattttaaatggtaatgctagaggtatttggataagataattatgaatttattgaattttatcaaaagaatattagcaagatttataaatattccacgtaaaattcgacaagtatattatatttgttggaattattttatgctttgggcaaatggtgttgaaataggaaaaaatatgaaaatatacaatcgtatctatcttactaagcatccgactgcacaggttattattggaaataatttggtgtttattagtggtgatggatttaatccgctatgccgtaatttgagaggatgtatttatgccggtgaaggagcgaagataaaaataggaaacgatgtcggaatttcttctgcgtgtattagggctaaacaatacattaagataggaaataatgtaaatataggtggcgattgtattttattagatactgatgctcataatatgaattataaaattcgccgtaagagagatggagaggatgggcgtacagctaatagtgcccctattattatagaggatgatgtgctgataggtgctcgttgtataattcttaaaggtgtaactattggagcgcatagtgttattgcagcaggctctattgttactaaatctatacctaaagattgtgttgcgggaggcaatccttgtaaaatcataaaaaatattagggatattgatatattttagaaaagaaagaatgatttagattattattatttttcaaataagttaaaagaacaatgatttttttcatttgataataaatgtattatttttatatagtggtgtgttgtggataattctttgatttcagtcataacagtttcttataatgctgtttctactattgagcaaactattctttccgtcattaatcaaacttattctaatatcgagtatattattattgatggtggaagtactgatggtactattgatatcattcggaggtatgaagacaaaatagcttattgggtgagtgaacccgataggggtatttatgatgcaatgaacaaaggagctagtaaagcgaatggagagtatatagcttttttgaattcagatgactggtatgaacttgatgcagtttctataatagctcagtttgccgatggaaaaactgatttaatatcaggtattattaagctatataagaataatatatttttatatgctcacggtgcatctatggataacatttataatgagatgattgcacatccatcaacttttatgcgaagagatctttttggggaactgggcggatatgatttgacgtatagttatgttgctgattatgacctaatgctaaggttaaagaaacatggaggacattttgtttttatagataaagtaatagcgaattttcgtttggaaggagcttcttcagatgtaaattctttgctggagaaaaatatattaaaacgtatctattgtaaaagaagcttttggaaatattggttgtgtagatattttataaggatatatgttgccacattataattgtatctacaattttgaatttgacaaacagatctaagagcgtttatgaatatacttgaaataacgggagaacctataggaacaggtggacaagaaatgttcattataaatgtactgcgtcatataaatatgaaggacttgaagatagatttgcttactccgtattattgtgagaatgagatctatcgtgaagaggtggtaaataaaggagggcaggtttattgtataggattaccttttgcaccgggcggatttcgctggaatataatgaagcctcttaatcgttttttaaaagtgaaccgttatgatgttgtgcacatccattcgggcagtacttccatgttgatgctgtgttcgcttgttgccagatggaatgggataaaaaagataatagtacattcccattgtacaggttatgtgaaatcaatgaaatattatttattgaaaatgttaacgtatcccgtattaagattcattccgtcggactattgtgcatgttctgtagaagccggtatgtggaaattcccaatgagaatagtaaaaacaaaattgcaggttgtgaagaatggaatagatcttacaaagttccatatgaataatgaaaagagaatggaatataggtctttattgaatatagcagatggaacgatagttatagggcatgtcggacgattttcttttgtaaaaaaccaggagtttttgatagaagttttgtctcttgtcaaacagcaaaatatagatgtaaaattaatgttgataggtaccggtgaaacgttgcatgaaattagggatctagtaaaggcaaaggatttagaaaatgaggtgttgtttgttggtgctattcctaatgtatatgattatatgcaagctatggatgtttttgcatttccttcacgttgggagggacttggcatagtcggaatagaagcccaggctgttggcttgcctgttattgcgtctgatgtcataccaaaggagatgaaattggttgattctgtttcctttctttctttgaattgtcctgaaaagtgggcagattgtatggttaaaacagcttttcatattcggagggatagtatagaaataataaagaaccaaggatatgatattatcaatacggcagaagttgtaagagctatttatactaatcccccaaatatgattgataaaaaagatagccaaaaatcccggatatatgatatatagatgctagaatataataagttttttttaagtgctgagaaatggacttagaaatactatatgagaatgttaatataagacggtatgttgcaacattatagttatatatattctgtaccctatctcgtatacttttttttcttattattggcaatgctaaaagaatttgtatatctgaataaacgacaggaaaagaagaaacttgatttgctagtattgggttctttgatcgtttttctgggattacgtggattcgtttatacagactggactttgtattatcagttctttttgaaacttcctatgcttgccgactgggattattggacattggatggcattgtatttgactgtggatatgaaaagggatttattctatattctatattaatcaagtctttattttcaaattattttatttgggtttttattggttctttacttgatttgatagttatacataaaattattaccaagaatacaaactattatattcttgctgttatcatgtttattttatttggaggattgactatagagtttaacctatatagaaattcaaaagctattatttgttttttgttgtcaataaattatttacaaaaaagaaggttgctcccatatttgttgttgaatactctaggctgttattttcatatttcagcattactttatcttcctctgtattttattttagatcgtcggataaatatgaaacttatttggaccttatttattatagggaatttgatatatctgtttcaaataccatatttatctaaaattttgctatctgtgggttccatattaggtggacgaatcaatgctttgatatatttttatatggcagattctcattttggggttggtgctggtattaccattggctatatcgaaaggacgatctcatttatattattagccttatactatcaaaaaagcaggaactcatttactcaagtttatgtgaatatgttttttatatatgcgtttatatatctatattgttctgaattttcgataataacactgcgtgttccattgctttttgttttttcatatactatcatttatcctcaaatatttgcttgtatcacaagcttgaaaactaaaaggtgttttcttgtagtatttgttttatattctgtattgaagctagcggaatctaataatgaaattttttctaggtatgataatctgttatttggtattgaaaaatatgaagaaagagaaaaaatcttgagacagtttatagataaatctgaataggtgttttatgtattaggaactgtttatgaatacaattcaatatcttcataaacagtttgttgcaaaagatttaatatagtttcatgtaatatgagaaattctaatgttgtattggcggtagtagtaacatttaatcgtttggatgaactgaaggtttgtgttgctgctttgaaaagtcaaagttatgggtctttgaatattctagtagtgaataatggcagcacagatggaactaaggaatggcttacacaacaatctgatgtaatagtcatcaatcaagaaaatttaggtggtgcaggtggtttctatacaggtatgaagtatatgtatgataatggatatgaatggttggtcatgatggacgatgatggtatacctgacaagaacgaaataaagaatttaattcagtcttatgataaagtggtttcagcagtaggcaaagaagtaattctaaatgctttagtcgctgataaagacgataaagattatacagcatttttatgggcacgtggtagcagacgaactactaaaataacagaattacaaaaagaacagtttttcaatgatatccatccctttaatggtacattagtgaaacggtctgttattgagaagattggtatgataaagaaagaaatgtttatttggggagatgaaaaagaatatatggctcgcgctatccataatggtatcgggctttatactgttccagctgccattcattatcatcctaaggagaaaggcaggaaaggcaatatcattccgttgatatcaaactatcaaattttggtaaagcctgagaagatgtcacattattattatcgtaatgaaggatttgtgtataatacctatcccgagaagaaaaagcatatgatagctttttgtacagctcaaatagtttacaatatcacccactttagatttgtagagttggcaaagtttatcaagtactttagagagggaatgcataacaaatattaattcaattccctaatcttataaattaattatttttatggacatcaagattttggtggcatctcacaaaaaagcggagatgcctgaagatagtatgtatctgccggtgcatgtaggaagggctttgtatcctgataaagagttcggatatcaatcggatgccgaaggtgataatatttctattaaaaacccttattattgcgaattgacagcactttattgggcttggaagaatctgaaagcagattatgtgggattggctcattacagacgccatttctctttgaagactgtgcatcgtggaggatggaatagtgtactgaccggaaaacaggcggaaatcttatgtagaaaacacgatattatacttcctaaaaaacgaaacctttatattgaaactgtctattcacattatgatcatactttttttggagagcagtttgatcgtacccgtggaattatcagtcggagatgtccggagtatctggatgcatttgataagaaaatgaaaagtcgcagtgaacatctttttaatatgtttataatgaaaaagatgctttttgaccagtattgtgaatggatgtttcccatattggaggaattggaggcatcttatgatttaaagagtatggagcctttccaggccaggcttatcggtcgtgtatctgagcgtttgcttgatgtatggattaataagaatcaattgaaatataaagaggttggttatatatatttcggtaaaaacaatatgcataaaaagatttggggatttctgatggctgctatatttcataaacgctataaacaaagtttctgaattttactgctgttggaataaatcaataatttaaaatatggtgtttatgattgagaaccattatgattatcttatcgtgggtgctgggctttttggtgtcacatttgcttatcgtgcccgtcaacagggaaagaaatgtttggtgatagacaagcgtccacatttaggaggaaatatatattgtgaaaatatagaggggattaatgtacattgttatggtgcacatattttccatacttcggataaaagaatttgggattttgtaaattctattgtagagttcaatcgttatactaattctcctgttgccaattataaagggaaactttataatttacctttcaatatgaatacattctatcagatgtggggggtgactactcctgctgatgcaatggctaagatagaagaacagaaatttgaagcggtagcaaagatgaaggctgatggggtggaagagcctcgtaatttggaagaacaggcccagatattaataggtaaggatatttatgaaaaactgataaagggatataccgagaaacagtggggacgtaaatgtacggaattgccggcttttataattaagcgtttgcctgtacgattagtgtttgacaacaattatttcaatgacaaatatcaagggattcctatcggaggattcaataagctgatttccggtttgcttgaaggggtagatacactgattaatacagatttttttactaacagaaattattgggaatctatagcggataaagtcgtttttaccggagcgatagatgaatattatgagtattgttatggtaaattggagtatcgcaccgttaaatttgaaacggaaacgcttgatatttccaattatcaaggtaatgcagtcgtaaattatacagaacgtgagataccttatactcgggtgattgaacataaacattttgagatgtttggttcggaagtgattgcttgtcccaaaacagtaattagtcgggagtattccgtagagtttcaggaaggaatggaaccgtattatccggtaaataataaccaaaataaccgattggctgatcagtatcatcaattagctgcaaaggaaaaaaatgttctatttggtggtagattggcagaatataaatactatgatatggctcctattatcaagagggtcttggatatgaaaatatgaaaagcatttttttgaataaatttaactttgatagttcaaggagcgaatttcgttccatatatgttgatatagttaaaggagtggcgattatttcagttgttttattacatacgaattttcaatttccttcttctcattatatgccgcttagttctcttttaggttggatgtggcatgttgcagttttctttttgataggtggcttttttataaatgagagcaaattaattcagccattttttttcataaaaggtaaattgggctctttgtataaactattattatatttctatattcctgttgtccttctgcataatttcttcataagaatcggttggtatgattcattaacagattatggaggaaaatatatgggattttgggatttgaaacaaatgatatctatgttgttacaaactttctgttttgcgggacgtgaacctatattgggtgcaatgtggtttgtatatgtattgtttctggcattggcaggtttttccataataagttttgttcttaagcgattaatacaaaacgacaaacaatatgagtggataagatttataactttattagtattatgtgtagtttcatgtactcttactaacattgtaggttttactattccaagatttaataatacaatgacagctatgtggctgatttattgtggatatatgttgaggaataagtttcaaatagcgtttgataatatatttttaatgttggcttctataataatcatctatcatcttgctagtatttatggagaagtgcatttgaatcaaaattattattctgatgttattactttaacagtgggagctatagctgttctttattttatatgttattgggctaaacggctggagcaaagtttaataggaaagtttctagcttattgtggcaaagaatcattttatattatggctttgcattttgcagggtttaaattggtaacatatgtgcttaattggtgtggaatagatagacctttgagtgcactggcggcaccggtagatgaatctggttctattatgttattatatgttattgttggcatcatgtttcctctttttttcatgtacctatttaggtcttgtaaagcattgattaaaaaataattaattctgttatttatgaactatttcatttttggtggtaccggtttcatcggtacccacctcgccagtcttttgcacgaagtgtatcccgaagcaaaaatttacaacttggatattatagagccgggcactccattaccgacagtaaaaaattataaaccggctttaagaaaaggggaggaacatgcagccacattcatctattgtgatgtacgacagccgatagagttggaaaaagtagatatcactcccgatgatgtgatctttaacttcgccgccgttcatcgcactcccggtcatcccgatcctgcatattttgaaacaaatatccgtggtgcggagaacgtatgtgcctttgctgaacggcatggtatccggaaaatagttttcaccagttccatagccccttacggtgctgccgaggaactgaaggaggaaaccacgctgcctatgcccaacaccccatacggcatatccaagctggttgcggaaaagattcatcagacttggcaggcaggaggtgaaggccgccagcttaccattgtccgacccggtgtggtgttcggacggggagagaatggaaactttacgcgtctgtattggggcattcgggggcataagtttatgtacccgggacgcaaggataccatcaaggcctgtatctatgtgaaggaactggtgcggttcatgctttacagattggaatatcacgatagtggggtggaactgtataattgctgctacgagcctgcctatacgatagagcacatcgtagaatccatgaaaagagtgacaaatatgaaggtaaaagttcctttcatgccgggatggctgatcatgactgctgctggtatagccggagcgctaggctctccgatgggcatctgtccggcacgagtgagaaagttgcagatctctacgaatatctgcggaaaaaaactgtccgcttcgggctaccgtttccactatacctttgaagaggcgctggcggactggtacaaggataatggtaacctgtatctgcaatgaggaggctgatactttttcttttgttctttgtaatgatcggtgcggtacacgcccagttcacctacgggactacaggactgttgaatatgcctactgccgatatgcagcgtgacaagacgttcatgtttggcggtggctttctggagaaacatgccactcctgcccgttggacctacaatactttcaattattattttgacatcactattttcccctggctggaagtatcctatatttgtacattgcacaaggctatggaggttgatcctgcatacggtccgggtttttgggttccttccacgtatgggaagtttgttaaccaggaccgtaactttgcggtacgtttacggctgtggaaggaaggctggtggaaaccgtggactccgcaaattgtactgggtgcgaatgacgctcttaataattcatggacggagggtagcaagattgagatgagttcggctacggcaaatggtttttacagtcgctattatctggttgttaccaagcatctttctatgaaggaggtgggagagtggggcttgcatctggcatatgtttataacaggcggaaggattacccgttaaatggtcccgccatcggtgctaatttccgtttttctctgcctcaaacttcttttatcaacaaagcggtaaataacttgaatctgatggcagaatacgatagcaaatcgataaattgcggctttgagtacagcttctggaaagactacatcaacgccatagtagaactgaaccgttgcaagtacttttccggtggcttagtcttcaaaatccatttaaaataataaaaagcgctcattcataggaatttccagatagaattcgtttctttgcggtcagaaaccataaaatcatctttattatgtcatcccgctttgtaaaccctttcacggatctcggcttcaagatcatcttcggccagcctgccagcaaggccctgctgataatcctgcttaacgaactgctgtccggtgagcatcacattgaagacctgacatttctggacaaggaggaccgttcggagaatattcacgacaagggtatcatctatgacctttactgccgtacctctacgagcgagtacatcattgtggagatgcagaatcgttggcatagccatttcctggaccgtacgctttattatgtgtgccgtgcggtgagccgccagatggagaatccgtcctctaaagaggtatgtgttcccgacactccgttggagggggattgcggtctgctcagggaagaagaggcttcttacggtctccgttacaggcttcctgccgtgtacggtattttcctgatgaatttcaaggaggatggtctggaaagcaagttccgtaccgacacggtggtttccgaccgggacagcggtcgtgtggtgaaccggaatttccgtcagatttatctccagtttccttattttacgaaggaactggacgaatgttctattttatccgataaactaatgtatgcactgaagaatatgaacaattggaacagaatgcccgatgcgctgaaagaacaggttttcagccatcttgaccgccttgccgccaaggctcacctgtctgagggtgaccgtatcgcttatgataaggcggtggaccgttataacgtgagccgtattgtggaaaatgatatccgtgaacaggctgtcgcggaaggaaaagcaataggaaaagcaataggaaaagcggaaggagaggcggaaggacgtttgaaggagcgtttggaaatcgcccgtaaactgaaagagaacggcttttccatagcggatattgtccgggttgccggactttcggcggaagaaattgataagctgtaacggtgtgcacgattgtactgctaggtgatttgcttctgttttgtagaaagatgaataggtgggtggggtaaattaagaatgatgtcaatgtcggttctctatagggctatcgtatacgattagtctggtagtctgtagattgagtaaattcattattgtaaaacctttctacaaagaaaaacaaatcatacgtaagggcattctccatgcagcttcccccaaagaagaaactgcatggtgattgccactttctttattatttctccaagtacccgaataccccctccgcatcgaaacacggacaagccttcgggatacttcccggcatatccctgtgtccccttatccggacaccgggaaagattttcaccatccgcatcagcaacaaaataaattgttccgtctgttccggtgtccgggtatctgtcggatgtccgtccgcatccagaccgccctcataacagatacctatgctgcaacggttccaggggcggcagtgtgcacccacttccagaagcttgcggtgctgggtcacacttccgtcacgacggatataaaaatgataccccaccgtgcggaaacctcgcattttgtggtcacggagcagttgctcggcggtgtaatcccgggtggagcgtgtggcgctgcaatgaatgacgatatatttcacggaagcggaggatgccatcattgggccgtcctcctgagtgaggagagcacgttcgttcggaatctcttcctcaccgattatcatagggaaagtttcttgaatcatggttgaattgaaatagggaattaagaattaaaaagtgtcatgcgatgggtcaggggctttttaaaagagagtggtgcaactggttacgcccaaggcggtgagcgctgctatggcagcttggataatggcgtgcagaatttgcttccaggtgattttctttgaattgttcataggaatatttgttttaaaggatttgtttttttctgtcattccggacaaagacgaggaatctgtgggcataaaaatgattgcattcagattcttcactttgttcagaacaacagtttcatttcagaaagacaggtctttacagaaatacaggtctatttcagaacaacagtttcatctcaaaaagacaaaatactatcagacttcagaagtccggaaagttcaggcgttttcttccgtcttgtcatccggtccggaagcctctcccgtcaagtccacagtgtttttccccgctttcagggctttaaccaccagcttggcggcctttcgggtagggaccaggttgaatacgctgtctttcagcaagctgaggaaacgggttccggctttccagcgcacgttcaggtcttccacatggatggcgggattgtatgtttccagtgattcggctcccatgctgttgatatgaatggagaaagtgcccagatcgcccatctggatgcgttgtcctgccagaagctgctcccgcatacagtccaccgcttggatcaggaccgcctggatgtcggcacggttgtatttggagccgtgggtcgagatatgctcggcaaacttgtccagtgtcatgatttctgagtactgggcgttggcataagccttcttgggagcatcctggtcactgggattggcacggagtgagatactgtagttgatcatcgtttttgtttttaaagggttattattatcggaaaagtgtcaggtaggagcaaggcgcacactgctgcggcatccggtgaaacttggggcaagatccgcggaatcttgtaccaggatttttgtaatcttgtgccgggttgcggcttcttccttctgacactgcaaagataacctcacgtccgtgcggcgtgaccccttccgaccccttttgaccctttggggagactgtccgggaactcggtcagcgcttgcgtcatgtggtgacttcaggcgcggatttcacggttccctctttattctttccgcgtaatccacgtctcagagagagaggaagagttctcggacagtctgtggcagatttcagggggaatcacggttctcccaggtggaggtagacgagttgcaactggcggcaggtgaaggatttctggcagggatggtatcccgtggcttccagggcgtggagtaacggtgcgcactgggcgatccagcgcatcagatgacgcacggctactttcggcgtactgtccggaaaatagagaagggctgtttcggtcttattcatgaatggtttcttatttaacgtgagtttgatagatgataataaagtttatccggagttttctgaacaatccaaataaactgccataaacgatttttgctatccgggaacaacagccgcacggagcagcgacggggacacagggacagtggggacacccccttttttcctcacacacacatacgtgtacatatagaaagccgggtcagttcttgtgatacgtccccttgccgtccacacttaccagcgccccctgtttggtgagccgtttgagccaggtaagcgcggtggattcaggtatcctcctgtcgtgcgctttttccagcagcagccggcgggtaaactcgtcctccatttcggcaaagagcatattcttgtccgccgtgctccggcgcttgataacggaggaggacagaaacgaaagaacatgggtggcgtgcagataaagcggctccaccaaggcaagcacggcatgaaagtcatcgtctgtaatcaccatgttccagcgtgggatgatacggtccttcagattatcggaagaaatatgcgcgtcaggtttcaccagagaagaatcttccaggcttcgcaggatggcgactatcgacatcatgcggcacgcattgacggcaagacggatgacggaactgcccatctcgtctccgttgatcttgccggaacgatggaacagtttgtcgaacaggaagttgaactgtttatgctgggcatgggtcagcttcagggtaaacaatccccgaagcgtcagttcgtccagcgtgtttttccattcgttgcccatcaggcggaattcctcgtccacatccacctcatcctcgccaaactggtccgcccattgggtgatgcgtggcatataataaaagttctggcgggagaacagaccgttctccgccgtggggatcaggggctttacctgtgcgggcgtacccgagagcaacacggagaggtagcttctgctcacctcctgatattcgcggtcggtacgccggttgtaggacaggcggtcgtggtcgaacgccttgcgcagcgtgtcgctccagtttccgtattcggtccctatggcggtggatacggtgtccgcctcactttcgcagatgaggcccgttccgttggaatccatgatattttgcaggatgcctgttccggtgttgtttcccggtatgaggaacatccggttgggaggcaatacgggagcttcctgatttctccgttccttgcccagagaatcgtaggccgccttttcccggcggtaagttttcatcgcctctttcacctcgttgcgtatcttgtcgtgtataggttcgatgaggagccgcacccacgtcaatgcactttttcctgcggcggacggggccacgatgaaagtctgcatacagggggcctgccacttccggccgtactggcaccgcactacgtgggagagggaggcacccagtacggtaaacgctcccaggagcaacacatcacgctgttcgggctttttaccgaaggagatgattttctccagcagctccggccacacatagtcctgtggaaaggtaggcaggggggaataaggctcggagccttcggtgagctgttcctcctcgtcggtatcatcggaaacgtcattttccaccttattatatcgcgcgcacgtgtgtggaaaatctggggttgtccctgctgtccccattgtccctgccttgtggaagccggcgctgccggaaatcttcactccgcattgtccggccagatggaatacggttcccagatgtatatcttctttatcggcatgaagcgcgttcgagaacagtgcttgtgcatttttttcgtcgtatttagaggaaagggagcagagggagaggaaatcattgcgtcccgcttctccgcaatcgtttgcgatggcgaaagccagttgtacatattcaatataggtaggggcaatgtctgcgcctgccatgcggacagcttcggtcagctgccgcaagttttctaaaggattgttcatgttcatgatatttgttgttttttgagtgcctgtttaaattttgtccggcattcttttgagtatgtttttctattcgttttaaatttcccggcgtatcaatgcttcctcgtcatacgagaggaaacaggcccgtaccaagtccttgccggaacggtccacgcctttgccggaatggtttgtttttttatcttccctgtccgggtggctgctgtggaaatcatagattgcttgtacgtagttcatcgcccagtggatgttttcggaggtattttgtttggtgtcgggtatgcgtgccaggtcgtaggggatgaacgcttttactccgtgtccgctggggctggtgaatgccagtacagggcgcaggaggaggtcgtcgaacaattgtcttttcagcttttccgcttcccgacgggaatcaaggtggtctatgtccaccacaatcaagcccgacggtccggtcaggctgtcgcttttacggtaggaaaaaacgccgcagggagtaacgtagggtagcgtctgttgcttgagcatacgatagactttttcatccccgttttccgttgcccggcgcacggtctcggtcagtgtcttcaggcgttcgctggatgtgataagtttgtacacttcctgtaaggttatttccttgtagggcgttaaggtgggcggctggatgattcgtccggtggtactgtcctttaccggtgatataggtggcagaaacagtgacattttaaattggttcattcgtttttatttattaaatttgcaagccctgatatttatgaatcaggttattgattttcaatgttacaaagttcgatataataactgagatacgtgtgtttttgtcctgaacggggacatataaatgattattcatataaaaaatacgatttaatccgatggaacatttgaatcctgttgatcaggcccggcaattggctgccgaggtagtgaaacgtctgggccagttgaatctgcacagacgggagttggagcgtaagctccatgtggctaatggcttttttaccagcctggaagaaaaaaaataacatgacgcttcttctttttttcgaggtgaaggcggttatagaagaacactatgagaggcgtatcgagttttacaggtatgtcaatccgccgctgtcacgggaggcggaacgtgaactgggggagtggaaaggaaaagtgagggagataatgaggatgtgttgaagttccgatagggggatatagcgggatatttggcccataacacgctgaaaggcaatatgactattgcccgtatgtatcttgcgatagccgggggagatatggacggtgccttgcgtcttcttcgggaattcctttctactgttccgtattgtgataacacgaattatgagggacattacagcaactgttctacatcatcttttccctgttcgggatgtatgtcgatgtggaagtgcgtatcccgaacgctttttcctcagtggattgcaagtggtgaaggtagggatcaattttgatgtggagaaacacaccttgggggattatataaatcaccgataagaattaatctgtaaagaatagaatatttactataggctgcatgcaatgatgcatgtggccttcccttttttgttgccggtagcgaccggcatccgcataatgtattgcatgaacgattgtcttcgtgattaccagcaggagatgaagctccgcctctttgaggagtgggagtttcatcggaatgtgatggtgcagatgcccaccggtacgggaaagacgcatctgctggccgccatagtgagggaattcctgcgtggttccggcagccgggtatggattgtggcgcaccgccgggagctggtggatcagatagaggaaaccgtgtcccggcacgggatgagcaaagaggacggaagggtgagggtgatgtccatccagtggttgtcacgaaaccggaaggatatgtacgaagaaccggagttgatcgtcatcgacgaggcgcatcacgccctggcggaaacctaccggatactttgggagaaatatccggaggcaaggaaactgggcatgactgccactccctgccggctgaacggcaagggattcacggacttgttcaacagcctgatcacttcgtggactgtcgcggaattcatcggaaaagggtggttgtcatcctttgactatgtgtccatccgtgcgaacagcaaagaacagcggttgatagactcgttgaagaaacggggtgcggacggggactaccaggtaaaggagatgaacgaggtactgaaccgggagacaagtatcggccggctgtatgagagcgtggaacgatatgcccacggaaagaaaggaatcgtatatgctgtcagcatcgcccatgcccgccggatagcggcttgttatagcgcacacgggctggagtctgttgctatcgacagcaggactccggcttcggaacgcaaggaactggtggatgatttcagacggggaaaggttaaagtgctggttaatgtggatatcttctccgaaggcttcgactgtcccgatgtggagttcgtgcagctggcacgtcccacgctttccctggcgaaatacctgcaacaggtaggacgtgggttgaggagatcggcaaacaaggagtcctgtatgctgatagacaatgtgggtctgtaccgcatcttcggtctgcctgcccggaaccatgactgggcggcgatgttcgaggggcggatgattggcaacgcgctgtctcgggcacggatggaaacaggcaggctgtccgtatccggtctgctgccggaggatgaaaggcagcgggaggatgaactggaggtggtgataacgcacgaccggttgatggacttccttacaaaccggaaagattcagcaacggaaaaaggcggacagcccgttttgaaaagttattatgacagacaaagcgggctttggggattgaggcgcggggagaggatgacggtaaggccccggtatccggaagtgtttgatatttgtggagactgggcggcagtgagattcgggaataaccgggcaggtgtggtgaatgagatcggacagcccggaatacagctggaccgctgccggaaaatgaagttcatgaaggaggatttgcttgccgtgacagactgtgtgggcaatgaatcttacatcgacctgaaggtaaacagaacctatcgggagaaacccgtggtgttgtcattcggctgtatggaattgccatacggcggtgtggagctgctgaaggtgggagcgttctttttcagccgtaccggaaaaccgtatgtcaccatgcgcggggtggatcagaacggcatctacttttatgatttttatctgaagataccggattaccgtgttccgaaggactgccaactggtggatcctgtctggactaccttgtttgatgttttcgcctgtgtgctggcaggggatgaggaggaagtgtattggtgctgtggccgtctggcggaccggagcattgtggtgatggacgggaacgggaattattatcatgtggagaaagggaaggaaaagcggtatatagcctgtaacgctccccggccgggcgaggaagatttccatacggtgatggaacgtctgaaggaagaagccgggcggtgtgccgggatagctcaacggaaacaattgcaggaagaggaacagaaaaggctgaaaaggttggaagagatcagggatgcattgcctttccggatggggatgaaatggggcttgaaactgggggaacgtatcattgtgcctcccaaatacaggaagattctgcctcctgtgggctattattgcgcttacgaggaaaacgcctgccaatggggaataatggctctggacggaaaagtggtggtggaggccagataccagaaggtggatatagaatgcaacggtacggtgcatctgacggtgattccgggtaaggtgaagaccataaaactctgagcgtctgccggaacggagtgcaaatggcacaaataggaaccgggataaatttgtgtcatttgcgtcatttgcattctaaatagtcatcactaggtaatttaacactatgccttaagcgactggttaatgctgtcaatataatccagaatctcctgtctgcctgttttcttttcagaggaggatacgaaatgaggagggagttcttcccactgttctgtcaatttttttagatatttgtttacattatccttaaccttgccattggtcagcttgtcggctttggtgaagatgatagagaagggaactccattttctcccagccattccatgaattccaagtctattttctgaggttccagacggcagtctatcaatacaaacagattggtcatttgctcgcgttccaggatataatcctcgataatctgctgtatcttttctacctgtttcttgccccgggaagcatatccgtatcccggtaaatctaccagataccattctttattgatcagaaagtgattgatcagcaaagtcttccccggagtggaggaagtcatagccagtttgggacgtttggtcaacatatttatcagactcgatttacctacatttgaacggccgataaatgcatattcgggcaggttgtcctgcgggcatttctctacttttgtgttacttactacaaattctgcactgaatatttccataattctttgtttttatacttaaacaagtcagccccataaaagtcaggaagccgttaaacattaacatttcatagccaaactgatagccggtggaggtgaacaccagccggtctatggcatagcataatagcggcgaggcgatggctatgtaaggaacaaaacggtcgcgcggccgcattggggtgaacagcccgaatgcaaacagccccaataacgggccgtaagtgtacgaggcgatggtatagatagcgtcaatgacactcttgttgtttactgccttgaacagcaggatgaatccgataaagaggactgatatgcagaagtgcacgagcttcctccgtctttccgcttctttgccggacaaatggcttatgcccgctatgtctatacagaagctggtggtgagggcggtcaatgccgaatcggcgctggaaaaggcggctgcaatgatgccgatggtaaagaatatcagtacggcgaatcccagatggccttccgccgcaaacaagggcagtatctcatccccggctgccggcagggggatgttcagttgcgaggcgaacaataacagcaggattccgagtgacaggaacaggaaattgaccggaacgaatgagatgccgtagcaatacatgttcttttgggcttcatgcaggttcttgcacgacaggttcttttgcatcatatcctgatccagccctgtcatgacaatcgtgatgaagatgccgctgaaaaactgcttgaagaagttctgtttgctgtgccagtcgtcaaaaacaaagatacggctgtgttcattttcccggatggcatgtaccagtcccggaaaatccagattcagttggccggaaacctcataaagtattaatcccagcgccagcagcaggcagagtgtctgcaagctgtccgtccacacaatcgtgcgtatgccgctgcggcgggtgtatagccagatcagtaagacaatccctatcaccgtggcggcgaaaggaatatgaaaggcgtcgaatacataatgctggaggataaggcataccagatagaggcgtgctgcggctccgatgattttggacagaaggaaaaaagaggctcccgtcttataagcgtgttttccgatccggtctcccagataagtgtagatggatgtcaggttcaacctgtaataaagcggcagcagaacgtgggcgatgatgagatagcctatgaagaaaccgaaacaggtctgcatataggtcatgtcgatgccgcgtaccatacccgggacggaaacgaaggtaactcctgaaagggaggctccgatcattccgaaagaaacaatataccagggagaacggcggttgccgcgaaagaacgcgtcattatcggaatgacggccggtaaggcgggctacaagcagcagcattccgaaatagagcagtatggtcagcagaatataaattccgttcatgttatttttttgagtgcaaatgtactcaaaatcgctgaaattgcgtaagtttgcacccattataatacaaaataactgatgaaccaacaatatccgtccatgctgctggaaaaagcggtaggagagtttgccaagttgccgggtgtgggacgcaagaccgccatgcggctggtattgcatctgctcagacaggatacagctgtggtagaggcgtttggtaatgcgatgattaccttgaaacatgaagtgaaatattgtaaagtgtgccataatatatcggacacggaaacttgccgtatctgttccaatccggcgcgggacgcttccacgatctgtgtggtggagagtatccgtgatgtgatggcggtggaagccacgcagcagtacagggggctgtaccatgtcctggggggagtcatctcgcccatggatggcataggcccttccgatctgcagatagaaagtctggtggaacgggtgaaaggcggtgaggtgaaggaagtgatccttgccttgagctcgacgatggagggggacacgacgaatttctatatctcgcgcaagctggacggcatggacgtgaagctgagtgtgatagcgcgtggtatctctatcggggatgagttggaatatacggatgaagtgacgttgggacgttccatcataaatcgtactttgtttacgggaacggcataaactgggaaaaacagaaagagatggaaaagaagataaaacaattgctgcgatacttgcagatagaatatgtggcggtatgggtgttgcctttgctcctggtggctctttatgaaacaggggtgatgaccgagggggcttacgcgggcgatgtccgtatggattatgtcttgcagacggtaggaattttattggcggtggggttgattcctttatcgctccggctgttcagcctttccttggtgaagaatgtgaaacagcgttcattgccggaagccttgagaagttatcgtcgctggagtgagataaggacggggatgctggtggttcccgtattggtgaacttgtcattttattatctgactctgaacaacacgggcgtattgtgtgccatgatggcgctgatctcttccctgttctgtgtccctacccgcaagcggatgctggatgagctggatttggtaaaagaggagaatgaggagcctgctttatgatgagtgaccggcattttcaagggaacgggataaggctccgtgcgccggagccggaagacttggaagtcatgttccgttttgagaatgctacggatgtgtgggaaatgagcaataccacaggcccgtattcgcgttttcagttgaagcagtacatagagcagacccagaatgatttgtttgccgaccgccagttacgcctgatgatagaaaacgggaaccggcaggtggtggggatggtggatgtatgttcatttgaccctttgcacaaccgggccgaggtggggattatggtggataaatcctgtcgcaggcaggggatagggcgtaatgccctggttttgctggaagaacactgtttccgttatctgggaattcatcagttgtttgcctatatcgctgtggaaaaccttccttcccgcaggctctttgcggcgtgcgggtacaaagagagtgcggtattgaaagagtgggcgcatacgtttggcggtggatatacagatgtgctggttgtccagaagctgaatctcagttgagggaggggtattggggatagcgggcccaaatggcgtatttccctcccatttcgttcaaactggtatgccataagtcgcggaagtgctggttgagcaacgtttctttcccggcttttcctatgagccatgagttttcttttatttctttggcaagttgtccatgatcccatcccgcgtaaccggcaaagaaacggatcactccttcaatgggcttcccgtccagtatatattgttgcacggcattgaaatcaccattcagataaagtccgtttcccagaggcagtgcgccttccagatcttttagcgtatgcaggaaaaaaattgtctcccggctcaccggcccgcctttatacaccgggacccgctgtgcgaattccaattcggggatgaggtcattgagcagaatgtggtaacggaaatctttattcatgataatacccatacttccctcgtcattatgctcgataagaagcacgactgctcttgtaaagtggtagtcgttcatgaaaggggaggatataaggatgcttccctgttgtggaagtactttatttgattctacttgaaaaacatgcatatccatagttgcgtttccttttatttacactactaatatacatattatatttaaaaaatacatgaagtgctctcttttttttgtatttttatttttcttgtatcttaaatggcttattatcagagttgatgtgaaaaagttcaagaaaatattcgtaaaatgcttgcggatatcgaaattttgcgtacctttgcaaccgcaatcgagagagatgcagtataagaaaaatgaaatttggtgcgttagttcagttggttagaatacatgcctgtcacgcatggggtcacgggttcgagtcccgtacgcaccgcttctcaagaaagaaaaattaggaaaagctctgattcttaacggaatcagggcttttttatttgtttgaagtgaagcgggatatagcgtttctgcgaagtatgtcagggttattgaacattcgtctgtatcagattcataaagaactggtatgtcgtgaagctttgataaatcgcaaaacgaaatgattatgttggttgatagcttgttttatgaataaaatcggttacaatatgtaaaatatcatataggtatttcccttgttctttttaaggatagaaaataggaattatggtcctttatagtagaaataagagagttatataaaaaatagcttgtgaaaaatatctgttttttttgttttgatgtaattctttattaattttgtagtctattacattaacgtagatatttgtagataacacacgcacatttttgaaatgaaaaacattagtttcgtattgatgtttattcctttaatctcttttgcacagacatataaatatatagggatagaggatggactcagtaaccgtaggatatttgatatccagaaagattctaaagggtatatgtggtttttgactaatgagggcatggaccgctatgatggtaaggaaataaggcactataagttgctggatgaaagtaaaagtttgacctcctctatttatcttgggtggttatataaaggagatgaggggcgtttatgggtgattagcaagaaaggaggtgtcttttactatgatgaattatatgaccggttcaaggtagtgtataaattgtccgatgcctcagaaggggttacgtgtgggtatatggatcatagtgataatatatggttgtgcggcaaggactctattgtactttataatataaaggatactggtatccgtaaggtagctaacgtgatgcatggaaatgtacaaatggtagaacaagtagatagcagccattttttcattgcgactgaaaggggaatacgctttacggaattgaaaaataatgcattgagagttattccgatagaatctttgtgtgatatcagttcacaagtgaatgaattgtattttcattcggcatctcaaaaattatttgtcggaacctttgaggaaggtatttttgcttttgatatgaacactcgccagattgtccgttcctctattgatttgagtgatgtaaatattaccagaatctgtcctttgaatgagaaagaactgctgattgctacggaagggatgggaatacataaagtggatgtgaatacatgtgttacacatccttatattactgctgattatgaaagcaataatacaatgaacggaaacaatattaatgttgtttatattgatgaagaaaaacgtatttggctggctaattatccgacaggagttacgatagtggataatcggtataaaaattattattggataaaacattctattgggaaccagcagtcgttggtaaacgaccaggtacattctgtcattgaggatagtgatggagatttgtggtttggaaccagtaacggaatcagcctttataacagacaaactaaaaagtggcactcgtttttaagctctactgatcatcatttgaaggataaaaatcatattttcattactttatgtgaggtttcttctggaataatatgggcggggggatatacctccggtttgtataaaattaataaagagagtttgtctgtagaatatttctctccttttttgcttacttctataaatatgcagccggataaatatattcgtggtatgataaaggattcgcagggatatatatggtcgggaggattctataatttgaagtgctttgatctaaaggataatagtgtccgtttgtatccgggggtaagctcgataaccgctattgcggaaaaagatagtcgccacatgtggattggtacagttgcagggctttatctgctggatagagattccggcgattatcaatatatcgcaatgcctgtagagtctagctatatcaatacactgtatcagtcggctgatgggttgttatatataggaacgaatggttcgggagtactgacttatgatcatcgtaataaaaattttgtacattattatacaggtaattgtgcattggtttctaataatatatataccattttacctgaaatggatggatgtatcattatgagtacggaggatggaattactagttttcagataaaagataaaacttttcacaatcggaccagcgagcagggacttttgtcggcatgttttaatccgtcttccggtacattatgcaggaatggaggttttgttctggggagtacggatggtgctgttgaatttccggaaaaattgagattccctacttatgcttacaaaaaaatgatattaagcgattttcagatatcttatcagccggtttatcctggagatgaagattctccattggaaaaagatataaatgaaacgcaggtcttaaagctgaattatgatcagaatactttttctttggtattatcttctattaattatgattatccctctaatgtgttgttttcatggaaattggatggattttacaatgaatggagccagccgggaacttctaatctcatacgttatacaagtttggatcccggtaaatacacgctgcgcatccgggctgtttccaaagaggaacaacaattggtttttgaagaacgtgtactgacaattatgatagcccgtcctttgtggttgagtttttgggctatattagggtatgtgattcttgcgttatccctatttgttattatttatcgtgtcttgaatttaaagaagcaaaaaaaaatatcagatgagaaaactcgcttttttatcaatacggctcatgatatccgtacaccgcttacattgataaaagcccctttggaggaattgtttgagaaagaaagttttagtgaccgtggaaagaaaaggatgaagattgccttaaggaatgtagatgtactgttgcggctgactactaatttgataaattttgaacggacggatgtttattcttctgagttgtttattgctcaatatgacttgaaatcttatttacaggatgtttgtgatactttccgttcttatgctgcttttaaacatttggattttacctgcgactgtaatgtggaggaaggactggaagtatggtttgataaagagaagatggattctattttgaaaaatctgatctcgaatgcgatgaaatatacacctgaatatggtatggttcgtgtttcggtgcaggagaataaggatacttggaaactggaagtgaaagatacaggtatcggaatatcatctaaagaacataataaattgttcaagatgcattttcgtggagtaaacgctattaattcgaaaatcacagggagtggtatcgggctcatgctgacacgaaaactgatacgtctgcacggtggtgaaatagaggtaaaaagtgtggaacatcagggtactactataaaggtaacttttttaaaggggcgggaacatttgcgtaaatgtattcagattgagcctgaacgggaaatgaagaaaggaaggatggatgagattgcggttgcagatcattctgggaaatcttctgaaattgttgataatggtgctttaccacgcattttagtagtggaagataatgatgaattgcggacttacctgatagattctctttcggatatatataatgtgcaggcttgttgtaatggaaaagaagcatgcatcattgtgaaggagttttggccggaacttatcttgtcggatattatgatgcccgaaatgggaggggatgaattgtgtgtgactataaaaggtgatatagaaacgtctcatattcccattttgttgttaacggcgttgggggacgaacggaatattctggaagggttgaaagtaggggcggacgattatattaccaaaccttttaatttgaaaatcctgagagcgagaattgctaatctgcttgcaaatagagcattgctgcgcgaaaaatatggctctttgaatatggccgcagaaatattggaagagccggtaggaaaaaattgtttaaatgcccttgattggaaatttatatcgggggtgcgtaaaaacgtggaggataatttggatgatcctgattttactgtagattcgctttgttcattgcaaaacatgagtcgctccagtttttataataaattgaaagcattgacaggacaggcgccggcagattatatccggctgatacgcttaaaccgtgcggcggaattgttgaaagagggtggaaagtccgtatcagaagtggcagaaatgactggcttttgtgatggtaaatatttccgtgaagtattcaagaaacattttaaagtgagtccaagtagatatggaaaagaagaacctctcagggtggatgctgaataggaatatgattatcagatagggaggagttgtaatatttggtcttttctttatcataattgttttttagacaataaaatgcctctgtcttttcgtttgtatggttaatagaattatatttgtacattatacaatatctattgaccatgaaaacttattcattattagcaggcattttattgtctttttcgttatctattcaggcgggtgatctgaaattgtggtataagcaacctgccggaacgtgggtggaagcgcttccggtcggcaattcccggatgggagcgatggtatatggcggaacggcccgtgaagaacttcaactaaacgatgaaaccatgtggggaggcagtccttaccggaatgacaggccggaagcattgaaaagtctgccccaagtgcgtgaactgatttttgccggaaaaaacatggaggctcaaaacttgattcaagataatttttatgccgggaaacatggtatgccctatcagacaatcggcagtttgattatagaaactcccggacatgaaaaggtaaccgattattatcgtgacctggatttggaacgtgcggtggctactactcgctataaagtggatggcgtgacttttcaacgtgaagtttttgcatcatttcctgataaggtgatagtggtccgtttgacagcagaccggccggggaaactgaattttaaggtcggatatgtgtcgccattggaacataaagtcagcaggaaaggaaaaaaattggttctgactggaaagggtagggatcatgagggagtgaaaggattgattcgtatggaaacacagacgcaggctgatgtggatgggggtaaggtgaaaattgatgaccaaaacattacagtggaaggagcggacagtgttactctgtatgtttcatcgggtacgaattttattaattatcacgatataagtggcaatgagagtaaaaaagcgtctggatatctttctctggcattgggacgcccttatagtcaggttttacaggagcatatagctctttataaagagcagtttgaccgtgtaagattggatttgggaaccagtgagcgggctaagctggaaactgtcaaacgcatcgaactgttcaatgagggtaaggatgtttctttggcggtgttgctttttcagtatggacgttatttgcttatttcctcctcccagccgggaggtcagcctgccaatttgcaaggtatatggaataataaactggctgctccatgggatggaaaatataccatcaatattaatacggaaatgaattattggccggctgaagtgaccaatctgagtgaaacacaccagcccttgttcgaaatggtgaaagaattatcagttaccggcagggaaacggcacggactatgtatggatgcaacggatgggtggctcatcacaatacagatatatggcgtgccaccggtccggtggataaagcgttttatggtacatggcccatgggaggtgcttggttgactacccacttgtggcagcattatttatatagtggggacaagctgtttctttccgaagcctatccggcattaaaaggagctgctgatttttatcttgattatttaattgaacatcctgaatacggttggatggtgactgctccgtccatgtctccggaacatggaccttcgggagaggatactaaaaaagcttcaacgattgtagcaggttgtactatggataatcagataattttcgatgtgcttagcaatgcattgcatgcatcaagaattctgaaaatgtccgcttcttatcaagattctttgcggtctatgttaaatcgtctggccccgatgcagatcgggaaatacaatcagttacaagaatggctggaagatttagataatccgaatgacaagcatcgccatatttctcatgtatatggattgttccctagtaatcagatatctccttacactcatcctttacttttccaggcagctaaaaatacgttgttacagcgtggtgacgaagctaccggttggtccattggctggaaagttaatctgtgggcccgtttgctggacggtaatcatgcgttccggattattaataatatgttgaagctgctgcctggagatgaagtgaaagaggcttatccgcaaggacggacttatcctaatctgtttgatgctcatccgcctttccagattgacggcaactttggctatactgccggtgtggctgaaatgttgttgcagagccatgacggagctgtacatttgcttccggctcttccggatgcctgggccacaggaagtgtgcaaggactagttgcccgtggaggatttgtggtggatatgaactggaatggcgtgcagctggataaagcgaagattcattcccgtttgggaggtaatttacgtttacgttcgtatgttcctttgcgtggggttggattaaaagaggcaaaaggtaagaacccgaatgaatattatatgcaggcagagatcaaagagcctttgatttccaaggagataaacccgcaataccctgctttgtataaggtgtatgaatatgacttgatgacagaacagggacaagattatatagtggagcgtgggttataatacatgaagatgcccaaagtgatttttgtattatttcactttgggcacttttgtaaatggaagtgtcattgtgtagttatcagatggcttcctccttttccaattctaatgctctgggaaaaatgatattgttttccaggtggatatgttcatgtaatgcctcttcaaattgtttcaattgttgtaaaaccaagcggaagctggcacaagcatcttcaggggcggtgaatccattggttaatgaagagattttttcaaaacgttctccttcgtgattatgttcatcttccatcacttcgatgggatatagaatggtgccgcaatggaatttagctactttcaaaccttcctctttggcttggaacatttcataaacataaggaaataatacattctcttcttttgataaatgattttccaaatcaagaagcgagtcgcggaacagtgcttggacttgcaataactctggatgattctttgaatgcgcttcggttactttggctaataatgcttctatttgcggacctttggcacggattccccgatggtgtattttcaatacgtagtctattaataaatcgatgggccatccggcaaagtcaggagcattactaaccgtattctcttgtaattcatttaattcacgtgctactgcttcgggatcaataccgcggttccggcaggcttctgcaaacggagtattgccatggcagcaaaaatcaatatggtaacgggagaatactttggttgtatcaaagttgccggctacaatttgtccgactgtacatgaattgtaatttttctgtttcataattattccgtttattcgttcattaatcctaattttttcatatcactttctactgtaccgataccgcttactccaaagttctcgactagtactttcgtcacgttgggcgagaggaatgcgggtaaggtgggaccgagatgaatctcttttattcccaaactgagtaatgccagcaatacgattaccgctttctgttcataccaggcgatattgtaaacaatgggcagttcattgatgtcatgtagcccgaatacttccttcagtttgagggcgatgactgccaatgaatagctatcgttacattgtcctgcatctaaaacacgcggaatgccattaatgtcacctaaccctagtttgttataacgatatttagcacatcccgcagtcaaaatgactgtgtctttggggagcatctcggcaaaagtggtgtagtaatcacgactgcgcatacgcccgtcacaacctgccatgacgatgaacttacggatagctccgctctttaccgcttctactaccttgtctgctagttgaaatacctgattatgggcaaaaccacccatgatttctccatgttctatttctgtcggtgcggcacattgtttggctgtttctattatttcagtatagtccttatgtcctttctcatctgctgtaacatgcttgcaaccgggatatccggtagaattagtggtaaacatgcgttctttataagtggcattgggcagaggaggaacgatgcagttggttgtgaacaggataggaccattgaacgaggtaaactcctcccgttgtttccaccaggcatttccatagtttcctacaaaatgtgtatattttttaaatgccggatagtaatgtgcaggaagcatttcaccgtgagtatatacgtccacgccgctatccttggtttgttccaacaattcttccagatcatgcaggtcatgtccgcttatcagaataccgggtcgggtaccagttccgatatttacacgggtaatttctggattgccataactggaagtatttgctttgtcgagcaaagccattgttcgaacgcctatttcacctgttctcagtgctaatacagtcagttcatctgccgataaagattttgttgtaatttgtgcgatggtgttctgcatgaaacgatgaatactttcgtcattatgtcctaacctcatggcatgttccagataagcagccattccctttagaccatacataatcagttcttttaaagagcgtaggtcctcgtttttttcacgcaaaactccgactgttgcggcttttgcatcatattcatcgtgactgcctttccaatttaactcatcggcttccggcagaggaatatccttggcaaaagcttgatgtttaaggtcattacgtattactaatcctttgtcaatgcgtttcataatgctttcgtcgtcgaaattggcattggtaatggtacagaataaggcgtctacaataaaattgtccacatcttttttaacggggagggaatgttggcgcaattgatctgccacaacagaaattcctcgtactacaaaaagcaataaatccatagtacgtgctgtagttgcattttttccacaaacaccttttaaggtgcaaccgaaacctttggctgtttcctgacattggaaacaaaacatgttattctccatatcttttctcattttaatgatttctattacttttgtgcaaaagtacatggttttcgtcttttaagttgtaccatatgttacagcggatacaaataacagttaaaagaaagtaggatggaactgacaggattattgcagatagctccttttcagggaatgaaagaagaagaattggttgctttactattcggacttccgaatagtttgaaacactttgaaccgggtgatatcattgcccggcaaggtgacttatgtaaagggctgtacattcttgcatcgggaagggtacgggcgggaatgataaatgatgaagggaaagaactgacggtagaagaaattggagctcctaacttgctggcctcggcttttatttttgccactgaaaatcgttttcccgttaatgtagaagcaataggactttgtgaggtttttataataggtaaagaacgatttttagaatttatgcgtttgcatccattgatgatgcagaattttttgaaggatatttcggacaggagtgtctttttaagcaggaaattgaatgagtttgctttgttgaatttaaagactcgtttgttgaaatatctagaaacacattctgctattcataatcagcaggaggtggcgcagaagctgggagttactcgtccgtcattggctagggcgctgtctgaactggtgaatgaagggaaaataaagaaataatttgagatttctttttttaagtggaaaacgtgtcttgcctgaattcaaacagacaatgcaacagtgtcgaattcattgttagttaataatttatatttttcctttggggtcatgtaacccaatctttttctcggtcttgagtttaagatgttttgaacgcgcattacctgttcattggttatgtccctaaagtccgtacccttcgggaagtattgcctaatcaaaccattgctgttttcattggctcctctttcccacgagtggtatggttttgcaaagtaaacaaaaatatttagtttacgtgcaatttcttcgtgaaaactaaattcttttccattatctgccgttattgtatgtatttggtctctaaaaggttccaaggcatcgatggcagctttagttagcgggctggcatctttcccgctaagtagtcttatccatactagtccagttaccctgtcgtttatagttaatagtgctcctttgtgattcattccaatgactgtgtcaatttccaaatcaccaaaacgtactttcttgtctactatcgtaggacgcttgtctatgtccacgcggtttttgataaaaccacgtccattagtcaatgcacctctcttcttatgacttcttccccgtcttcttaaatgcttgtataacaacttatctccatgctttttatcttcccaaatatactggtagattgtctcatgagaaactgtttccaagccctttgttcgcataaacccagtcacttgttctggactgaaatctttctttatgagtatatctacttgaattttcaagtcgtccgtaaacttcacgaagtgctttcgtgaacgcattctggacatatacttagcctgagcgagatccggtttgtaaatgccattacgtttatcactattacgacgtaattcacgacttatagtgctacgatgaactcctacaagattggcaatctcggttcttgactttccgctttgcagataagcggaaatgttatacctttgttcttcggttagctgtttcatattgcaactgaatgttggggaactggaagatgcaaagaaacaacttttccacaggggaacaaaagggaaagaaatcttctttctctgttcctctgaaaaattattcttttcgtatcttctcattgtcatcattctcactcctgttgcattatccgcttgaacttaggttgtatctttgagagtttttatgtgtaacccattcttgtgaaagtgttcaagttgtttttctataaaaactttgactttaaagaaagaaaaggatccttgtctataaggattggttcttttgaaatgaggactattttgaaattctcttgattaaaaaagagggtgaattcaagaccctttatgtgattcttttgtcttgattcaccctttgggaaatatttggttggtgtgtattcaacatgttacttcatctgaatacttttatctcgtacttttcttaatatttgttgtaattcgaatactttttcgggatgttcagtcgctaaattcactttttcccctgcttgtttcatatcatataactggggaatacctaaataaccagtttcaatttttggcccccaaggaatcattttaggaccatcgctgccttcaataaatttccaatctttagtacgcacggatagggtgtgattggatgcctgttcaataacccatgggcggtctgttttgtcttgtcctaataaatttgctaaccgattgtagctgtcgggagcacttcctttcggaatacgggcatctaccaaagaagccagtgatgccaaccagtctatttgtgaaataagcacatcgctgacttccggcttgttgatagctttaggccagtgtacaattacaggaacacgggtacccccttcaaatgcactgtattttccacctctcaggttaccggcaggttcgtgcccgttcagtagctcttctgccttgtcatcgtatccgtcgtctactaccggtccattgtcgctggaaagaataattaatgtgttctgggtcaatcccattttatcgagggcctcgagtaactgacctacactccagtcaaattgtgcgatagcatcaccgcgcagtcccatcttgtttttaccacggaagcgattgtgtggaaaacggggaacatgcacatcattagtggcgaaatacataaagaaaggctcgtctttatgttgtttgataaaatcaactgcatgtgcggtaatggaatcggctatattttcatctttccataatgctttgccacctcctttcatataaccgattcggctgatgccgttcacgatagacatatcatgaccgtggctcggcttcagattatataaaagttcaggattgtcttttccggtaggttcaccggggaaattttttatatagcttacttctatcggagctgaaggatcataattggctacttgaccattctcgataaatacacagggaacccggtcggctgtggctgccatgatataggaatagtcaaaccccaaatcacctagagaagcggagagaggggcattccagtcttgttgtgcagttttatcacctaatcctaaatgccatttgccaaatgctcctgtggcatatccggagcttttaaacatatctgccatagtatactgctcggggcgtataatcattcctgcattgcctgcagctacatctgttccgggtttacgccatgcatattctccggtcagcatggaatatctggatggggtactggtagcggcagtggcgtgtgcgttgataaatcgtatcccttcggatgccagacggttgacatttggagtttgtacgttttttgctccataacactccaagtcaccatatcctaaatcatcagcataaatgaagatgacattgggcttgtctgtgttttgatttttattttccgcatgaacagccaagcatgaagtaaatgccaatgagagcattccgtaatgtctttttttcatagtaattatattgtttagtgagtaatcaattctacaaagataaagatatattttaaaaacggggattaattctacaaaattgtggaatgaaattgtggtatttccacataatgtggaaaataaaaaaatgattattctgttgatttttagtgtattgaatggtactatgccccgtggtatattttttgttatgtgaattaacataatacgctaaaaactaaacttttaaatatataaccatttaccttaacaaaacaagggtgaaaagctgatagaaaagccatgttccccctgaatgggaaaatctgtatataactcagttttaagcttcccggttcgtgacgaatcgggaagtttctatttttttcttaatgaatctagtttttctacaagtcttttactgaaaataagttaatattaatggatgaaatgcagtatttgatctcttttttacttttaagagtagaaaatagattaatacattatggttatgaaaaagttgaaccttttattattagcattcctagtagttatgggagtcactttccaatcatgtgatgatggtgatggctactctcttggtgatgtggcagtggattgggctactgtaaatgtgaaaggtgcccatgtatatgactttaccggtgacagatggggacaaatttggcctgcaactactgattatttttggtattccccgatagatggacaacgagttattctttatttcaatcctctgtatgataattatccggaaggatatgattgttcagtcaaagtgttgaatataaaggaaattctaactaaacctatagaggagttaacagcagagaatgaagaaacgtttggcaatgatcctgtagatatatttgaaggtaatatgtggattagtggtggttatttaaatattatttttaatcagaatatgccttctaaaatgaaacatttggttagtttggtaaagaacactacaattacgcccgaccaggatggctatattcatttagaatatcgttacaatacgtatgctgatactactggttattggagaaacggtgcggtatcctttaatttgaattctttggaaataacatcggaaacaaagggtataaaggtaaaaataaactcggctaaaaatggtgagaaggaagtcacttttgatttaaaagaaacaccgtcaccagtaggtttgagccaaatggatttttctcaaatggaaatcaaataattagggtttgattagagagagttgtgtgtggccccttgcatcttgttgtggtagatgcagggggctgattgtattgttgataacgtttttcagtttgatatttgttgtttattggttggttgatggaaaaaattgtatggttacttcgttttttttcttatttcagtgttttttcagaattatcttgtttctttgtctttaagaaccaaaagttggacttatgaaaatactattagtagaagacgatgctaatttgcgtgaagtgactcagcgttcattggaaaaggagcgttatgtggtggaaattgctgccgattaccgtactgcattacaaaagatagaggattatgattatgactgtattttgctggatattatgttgccggatgggagtggcttggatttgttggaaaagttaaaaaaaatgcataaacgggaaaatgttatcattctttcagccaaagattctatagaagacaaagtgctaggattggatctcggagctgatgattatctgcctaaaccttttcatttggtggaactgaatgcacgtatcaaaagtgtgatacgccgtcatcagcaaggtggggaaaatagtatcaaatacggaaatatagaaatttttcccgataaatatggggtgaccgtagctggaaaaaagattgagctgaaccgtaaggaatatgatattctggtttattttatgaaccgtcccggcagattggttaataaaaacacacttgccgaatccgtatggggcgaccatatagatcaagtcgataattttgattttatctatgcccaaataaagaatttacgaaagaggttgaaagaggcaggagctactcctgaactgaaggctgtttatggttttggatataaaatggtagtggaataaatgaaattgatttattatgtcattatccgtatatcgttagtgttgtcggttttattgactggctgggccatccttttctattttactgtaatggatgaggtgaatgatgaagtggatgactcattggaagattattctgaaattatcatcatacgtgcattggcgggagaggagcttccttctaaaaatacagcttccaacaatcagtatttcctgcgtgaagtgacaaaggaatatgcaggatctcgtgatgatattctttataaggattctatggtttatattcccgaaaaagatgaaactgaacctgcacgaatccttactaccatttttaaggatgatggcgaaaagttttttgaattgacggtagcgaccccttctatagaaaaagatgatttgaaagatgctatggcaggttggatgatttttctttatatagctttattactgactataattgttattaatgtgtgggtgttttatcgaaatatgcgtcctctttatgtattgcttcattggttggataaatatcgtatcggtaaaggaaacgagcctttacaaaataatacccgggtttcagaattcagaaaattgaatgaggcggctgttcgttatgcagagcgcagtgagcagatgttcgaacagcaaaaacaatttattggtaatgcatctcatgagatgcagacaccactagctatttgtcgtaatcggttggagatgctgatggaggatgaaaatctttcagaaagccaattggaggagttgatgaaaacccatcagactttggagcatataacgaagctgaacaagtctttgttattgctttcgaagatagagaacggtcaatttacggatactacccaagtagaagtgaataaattattgaggcaatatttggaggactataaagaagtgtatcaatatcgtgagatcataacaagtgtagaggaagaaggtattttctatcttacgataaatgagacactggcagtggtgttgcttaccaatttgttgaagaatgcttttgtacacaatatagacggtggacacatccggattgtcattactccccacagtgtgatgttttgcaatacaggggcggcacaaccactggatgcccagcgtatttttgagcgtttttatcaaggaaagaaaaaagaaggctcaaccggtctaggcttggcaatagcagatacgatatgtaaaatgcaggctctcaggctttgctatgaatataagagtggggagcattgttttatactttatacatccactcataatcaatgaaaaaaaatcgtgtttttttcagaatttcaaattcttttcagaatctcccttcatatttgcatcagaaaacagaatgtagaaccaaataaaaaaaatgacgattatgaaaaaggtattattattgttagtgtgcttatttacgttgcaaacagtggtatgggcggatgatgacaaacctattcaagtaaaccaattgcctcagactgcacaaacttttatcaaaactcatttccccaataacaaggtggcgatggctaaaatggaaacagactggtttgataaaagctatgatgtgatttttaccaatggagacaaattggaattcgataagaaaggggtttggacagaagtgaattgcaaatacagcgctgtacctgtcgctgtggttcctgacgcgataaagaagtacgtcactacgaattatcccgatgccaagatgctcaagatcgagagggacaagtatgattatgaagtgaaactttctaatggttgggagataaagtttgatatgcagttcaatgtgattgatattgacaattaattattagttatagatctgaagtgtggtttatgtgaataaactgaagctttgcaggccgtttcttgttccatgaagaaacggcctgtcttttttattgattttaatagcatagtaattctgccgacacgatcttgtaatagataacatggatatttgcatagttttaataataaagatatgcatctaagaacgtattatcctacagtggttttatcggatatccatctgggaacctctcattccaaaacaattgaagtcagtaactttctgaaatctgtcaattgtgaccgtctgatattgaacggagacattatagatggttggcatttgcgtaaggcaggtactaagaggtggcaagcaaaacatactgatttctttaaggttatcatgaagatgatggagaacttcggtactgaagtaatttatgtgtgtggcaaccacgatgattttctggacagcttggtccctatgacattctataacgtaaaaatcgtcaaagaatacatccttgaaacacatggaaagcgttattatgtgacacatggcgatatattcgaccgggttactacgcagatgaaatggttagcccggttgggcgatgcaggttatacattcctcttatgggtgaaccgcttttataaccaatatcgtactaagcgggggaaaccgtattattctctgtcacaggtcgtcaaacaaaaagtaaagtcggctgtttcctatatatcggactttgagaaagtattggtggagtttgcacgtgtacgtaaatgtgacggagtgatttgtggtcatatccatcatccggctaatacctattatgatggtattcattatctgaattcgggcgattgggtagaaagcctttcggcactgactgaggatgcggacgggaattggaatatcatggaataccatcatgtactagctgatgagaatgaagaaaataaagagtttaccctaatacatacagcctcatgaaatttttatttatagtacagggtgaggggagaggacatcttactcaagccattacgttggaggaaatattgcgccggaacggtcacgaagtagtggaagtactggtaggtaaaagtagttcgcgccgcttgccgggatttttcaatcgtaatatccatgctccggtaaaacgttttgtcagtcctaattttctgcctacaccagctaacaaacgggtgagtttgatgcggagcgtggcgtataatctagtgaaacttcctgtgtatatcaatagcattaactacattcgtcagcgtatcgaggacagtggtgcggatagggttatcaatttctatgaattgctgaccggactgacttatttcctgttccgtccctctgttccgcaaatctgtatagggcatcaatatctgttcttgcataaaagttttgaatttccaaaggctgataaagtaagcttggctcttttgaagttttttaccgtattgaccagcttgggggcgaaggaacgtttggctctttcttttcgtcacatgaacgatgatcctcagaatcatatccgtgtgattcctcccttgttgcgtagggaagtgactttacatgaaccttattccggtgactatatacatggctatatggttaatgcgggtttcagtgaaaatgtaatgaaatggcacaggcaacatcccgggataccgcttcgtttcttttgggacaagtgggaggaggaaccggtgaagagagtggacaatacattgagcttttatcaactggatgatgtggaatttttgaggcagatggcgggatgtaaggcttatgccagtactgccggatttgaatcggtgtgcgaggccatgtatttaggcaaacctattctgatggttcctgctcatatagaacaggactgtaatgcatatgatgccgaaaaaagcggtgcgggtatcatttcctcagattttaatttgcaacagttgctggaatttgcgaaagattaccaccccaatcgtgattttgtgtattgggtacgtggagctgaatatactttgttgaatttgttagagagtgattcttccaattatcaacaagttttatttaatgagatgtatttggttgaagagtttatttgattttcttataaaaactctctttaagtcatggctgtatgcgtcggctgtgacttttttattgttattgatttgtagttatattgacatgttattgtaatgtgtatgacgtatttttgctaaaaatattaaaaccgtatggagaagaagaaaaaggaagataaatattatctgccgagagatatcagttggatgtattttaatcgtcgcattttgcaggaagccatgaaagaacgtgttcctatactggaacggttgagctttttaggaatttactctaataatttggatgaatttttcagagtacgtgtagctactcaaagccgggtggccgagtgcgaagataaagcggcgcattctgaacgggaagaagcattgaaactgattagacagataaataaactgaacaacagatactctaaagaatatgaaggtgcgatcaagcaggtaacggcagaattggagaaagaaaatatttgttccttaattccgcaacactattacaaatataactttttaagtacctgagcaacaaaaagttgctcaggaatttgccatgtcagatttttcacctatcttagtgttgcaaatcaaaatatgtatcaaacccgacagacatggcaaaggtagcaattaaatccgagaaactcactccttttggaggaatattttcaataatggagcaatttgactccagactctcatctgtaatcgactcaaccctcggtatgagatgcaggctgtatggttatcaatacagcgaaatcatccgttcgcttatgagcgtttatttttgtggcggctcatgcatcgaggatgtcaccactcatctgatgtaccacctttcgcttcatccgacacttcgcacatgcagtgccgacacgattcttagagccataaaggaactgacccaggataacatttcctacacatccgacactggcaagacctacgacttcaacacggcagacaagctgaatacactgctcctcaattgcctattgtccacagggcagctgaaagagggcgaggggtatgacgttgacttcgaccaccagttcatagaggctgagaagtttgatgcgaagcctacatacaagaagttccttggttatcgccctggcgtggcggttattggcaacttgattgtcggcattgagaacagcgacggcaacacaaatgtccgtttccaccagaaggacacgctgaagaggttctttgaaaggtttgaacaaaacaagcttattatcaaccgtttcagagctgattgcggctcgtgttctgaagagatagtggaagagattgctaaacactgcaagaccttctatatccgtgctaaccgatgcagttcgctctacaatgacatctttgccctcagaggttggaagaaagtggaattgggcggcattgagtttgagctggcctccattctcatcgagaaatggaaagggaaggcataccgtcttgtgattcaaagacagaagcggatagacggcgaactcgacctgtgggaaggagaatacacctaccgctgcatccttacaaatgactacgagtcttccgagaaagagattgtcgaattctataacctccgtggagggaaggaacgcatcttcgatgatatgaataacggattcggctggaacaggcttccaaaatcctttatgggagaaaacacggtgtttcttctgcttatggcactcatacgcaacttctataaattcatcatggcgaggcttgacgtgaagaggttcggactcaaagcaacaagccgcatcaagacgtttgtctttaagttcatctctgtgccagccaaatgggtcaggacatcaaggaagtatgtgctgaatatctattcatgcaacaatgcttatgccaatgtgttccagaatgactttggataacaccgacaacttatagtcgtgattttgcgtattgcctcaagtcgcatggtggggtaaggggcatttatatgtctttatggtgacattcgatgcactgtgccccctttttactaacgatgcagattcttttcgcttctgtatcatattaggcgcgtagttgcggatttgaggttgtttagtcaatcatgtacaactggatgaggaacaacagttatttgtcgattctttttatcaacaacggctgaatgggtttattagtcctgtctggctgaaatcagtaaaacaactgggtaacgaagcggatgaaaatatctttttggctgtaaagatgaggaaagaaggacataaagttggagaatatgcaattatagagctgcctgtagcacaggcagggcgttttatccgtctgccggataaggatggtaaaaattacctgatgtatttggatgatgtggtacgctattgtttaccattgatatttcatggtatgaactataaacattttgaagcgtatgctttcaagtttaccaaagatgcggagatggagatagacaatgatctgcgtaacggaatgatgcagaaaatttctaaaggagtaaagagtcgcaaacgaggtgagcctttacgggttatttatgatgccagtatgcctaaagatcttttaaaacgtgtcatgaacaagttgaatctggataagttggatacagtattgggcggtggaaaatatcataaccataaggacctgatgcgttttccagactgtggccggaaagatttgaaataccctgaatggactcctgttttgaaaaatgagctttcgggtaacgttggtatgttggagctgattcgtaggaaagatcgttttattcatgtgccttatcatagtttcgattcttatatccgtatattgcaggaagcggcgattaataaagaagtaaaaagtatcaagacaaccctctatcgtttggctaaagattcgaaagtggtaaaagcattgattaatgcggcacgcaatggaaagaaagtaacagtagttattgaattgctggcacgttttgacgaggcttccaatatagattggtcaaagaaaatgcaggatgccggtatccgtgtgatatttggggtggagggactgaaggtacactctaagattacctatatatccatgaaaacaggtgcggatatagcttgtatcagtacaggaaactttcatgaaggtaacgcccgtatgtacactgattatatgttgatgacggctgctaagaatgtgacgcgtgacgtgagtttggtctttgattttatagaacgcccttattctcccgttcgcttcaaagaactgttggtatctcctaatgagatgaagcaaaaatttagccgtcttattaatgaagaaattaagaacaagcaggccggaaaacctgcttacattttgataaagattaatcatattactgatccggtaatggtgaagaaactgtatgaagcatcttcgcatggtgttcggatagacttgctggttcgtggtaattgttcactgattacgggagtgccgggagtgagtgatacaattcgtatcaatggcatcatagaccgttatctggaacattcgcgtatttttatttttgccaatggtggtgatgagaaaatgttcattggttcggctgactggatgccgcgcaatttggataacagggtggaagtgattgctcccgtttacgatccggaaataaaggcagacttgaagcgggtagtggaatatggtttgaaagatactctgcaaggacgggtggtggacggaacaggagagaatcgtccttggatatcggaagataagacagctttccgttcgcaggaggaattatacaaatattatttaaatgaaaacagaataaaggattaagatgggaaaagtgaattatgctgctattgatattggttctaacgctgtgcgccttttgataaaaagcattgacagggaggctgtgcaggagaaaaaaattaaaaaagtgatgatgcttcgcgtacccctacgactagggttcgatgttttctccataggtgaattgtccgagaagaaagcggataagctgagacgtttgatgaaggctttccgtcagttgatgaaaatttatgatgtggatgattacagggcatgtgctacttcggctatgcgggacgcgcgtaacgggaggacgataatcaagaaaatcgaaaaggatacaggtatccgcattgagataattgatggtcaggaagaggctcgaatgatttataataatcatatagagtgtatggaagaccgtctgggtaattatatgtatgtggatgtgggtggtggcagtacagagattaatctgttgactaacggtgagttggtatggtcggtgtcttacaacatcggtacggtgcgtatgctgagtaatgctgttaaagaaggaacttggcagcaaatggaagaagagcttatgaaagtgacggaaggtgttgccgcgatcaatatcatcggatcgggtgggaatattaataagttgttccgcctggcagataagaaggataagaagttgcaacgtttgccggtcagttcgttgcaaacagtctatgatgtgttgaaaccgctgactccggaggaaagggtagaggcattcagtctaaagcaagaccgtgccgatgtaattgtgcctgctgcggaaatttttctgaaaattgcagaagtagtgcatgcagaatatatttatgttccggtcattggactgtctgatggtatcattgacaatctgtatgccaaaagccttgagaaagaaatgaaagctgaataagctttcattttaatactgtttgtgttgtacggcttcaaaaatattcgcttttctctgataaattgttggaaattaatagttgaagttccaaaatttgctatatatttgtaatcgttaacaactaacaaacagaaataccatgatgaacaaaatgtgcatggcagctataatagctgcttctttgtatgcagggactacttttgcccaacctgccgccgtaaagaaaatcattgaaacgggccaaactgataaccgggtaatgcatcagttggatattctcaccaatcgttttgggggaagagttattggctcggatgcatatgagaatgcagccgagtggatgatgcgtgaatataaacggtggggtattgacgtacgcttggaagaagctggggaactgccggtaggttttaaccgtggtccatggttcggacgtttaatcgggggagatcaggcgatggatttgcattttgtcactccatcctacacttcaggtactaaaggtctgcaacgcgggcatgttttgatagagccccgtactcaagaagaactagaccgcatgaaacatcagttgaaaggcgcttgggtgttgatttcaggtgaaaatgtaggttggcctgttgaccgttctgctaaaggagattcgttgagagctgctatcaaagctgaaaatatagaaatagaaaagcagaatgctgccttgatggaagagaattggagcaaaggaaccaaacatgccatgaagcctttgcgtgaaatgccgggactattttataaagaaatgtgtgaggcaggagcacttggctttattcagtcggcacctgtacctttacgtgctttgtatgatcgtgctttattaaatgatccccatactacgtttgataatttgcccgaagtctgtgacatcaaattggatgaacatcaatacaaaatcatcaagcagatggtgaaagaacgccggaacttctggctggaatttgatattcgtaatcatttcaaactaggtcctgtgaaatatcataatgtcgtagcatccattaaaggtactaaatatccggatgaatatgttattataagcggacatcttgattcttatgatgtggcaaccggtggtatagactgcggtacaggtattggtcctatgatggaggctgcccgtatgattgcactttccggtgcaaaacctaaacgtactatactgtttgtggcttttgctggagaggaatttggtttgttgggcgcaaaatcttatgtcaagactcacgctaaagagttaggaaagattgctaatctattcaatcgggacggaggaccgactcctccggtgggaatctccgttcctcaggctatgtatgatgattttgtggaagtgtgcaagcctgtgaaagaaatccgtgcggattatccgtttgaagtaaaggtagcgaaaccttttaaacgtcctactcaaagcggtggtacggatgccagtgtttttgcagtggaaggagtgcctacttttggtttcaatacacaagacataaaaggatataatttctcttatggggaaatatggcatacggaacgtgatctttatacgaagaatataccagaataccaagagcatgcagctacggtaacagcggtggtcgccttgggaattgctaatttaagtaaacagttatctcgtgaaggaatgcacaaaaagtagcgcaaatgttctttttttcttcttttagtggaattatgtcgttttgatgtgtaaaaaatgttagcttaagttcaatctactgagataatctttacctttgctgcgcatataaagcaaaatgtaggtaaacaaaaaacctgcgatatttgttaatatagaaaaggtaaattatcaaataaaagtaaatagaagcttatgtcacagattattggacatatttcacaagttatcggaccggtagtcgatgtgtattttgagggcaaaggcatcgacaccgatctgcttcttccaagcattcatgatgcattgactatcaaacgcaatgacggcagaattttagtcgtggaagttcaacaacacattggtgaagacacagtgcgtactgtagctatggatagtacggacggtttgcaacgtggtatggaagtaattccgacaggacatcctattactatgccggttggtaatcagattaaaggccggttgatgaacgtagtaggtgaggctgtggacggtatgcgcccgctgagtaaggaaggggcgtttcccattcaccgtgaaccccctaagtttgatgagctgtctactgtgcaggaagtactcttcacaggtattaaggttattgatttgctggaaccttattcaaagggtggtaaaatcggattgtttgggggagccggtgtaggcaagaccgtgcttattatggagctgattaataacattgccaagaaacataacggcttttccgtttttgccggagtcggtgaacgtacacgtgaaggtaacgacctgttgcgtgaaatgattgaatctggtgtaatccgctacggagaagaatttaagaaaagtatggaagaaggccattgggacctttccaaagtagactataatgaagttgaaaagtcacaggctacattggtgtacggacagatgaacgagcctcccggcgcacgttcttccattgctctttcggggttgaccgttgccgaatctttccgtgaccgcaaaaacggtgacagcaacggaccacgtgatattttgttctttatcgacaatatattccgtttcactcaggcaggttccgaggtttcggctttattgggtcgtatgccgtcagccgtggggtaccaaccaacactggcaacagaaatgggacagatgcaggaacgtatcacttctaccaagaatggttctatcacctcggtacaggctgtgtatgtacctgctgatgacttgacagaccctgcgcctgctactacatttactcacttggatgcaacaaccgtattgagccgtaaaattaccgaactgggtatttatccggctgtagatccgttggaatcaacctcacgtattcttgacccgctgattgtagggcaggagcactatgatgtggctcagcgtgtaaagcagattttgcagcgtaacaaggagttgcaagatatcatttctattctgggtatggacgaattgagcgatgaagatcgtcagactgtaaaccgtgcgcgtcgggtgcagcgtttcctgtcacaaccttttgctgtggccgaacagtttacaggtgttccaggtgtcatggtttctattgaagataccattaagggattcaagatgattctggacggtgaggtggattacctgcccgaacaggcatttctgaatgtgggaacgatagaggaagcaatagaaaaaggaaagaagttgctggatgctgccagccataagaaataagagtaagtatggaacatcatgaagatcttcatttgatagtggtttctccggaaagtacattgtttgacggtaaagtggacattgtgatattaccgggagaatcaggctctttctctgtcctgcatgaccatgctccgttgatatcgtcattgataaagggggagataaaatatacagaggatggattagagaaatcaattggaatatcgagtgggttcgttgaggtaagggacaatatagtttcggcctgtgtggaaatctaatacataattatgtctttgttagccgtaaagagaaaatttatcatatcgttgaccatattaatggttgtgttgagttggggaggagccttggtatttcacaccttgttgcctaggtattattttgcctggtatccctccataccgatatttttttatcttttcggccttttttacatatttatgttcgggtactgttatcgggtaagtccgcaaaaaatggtggcggtttacttggtggcgaaagtgacgaagatgatgttgagcatcttgattatgtccgtctatgcagtggcggtggcacatcaagttctgtcatttataggaacttacatggtattctatattatctttctgatttttgaaacccgcttcttttttcattttgagataaaacataaaagtaataggtacaagtataagtaatatgagaagtttacgatatataggaacggttttaatgttgctgatcgcttttctgcaaggagccaatgcccgggaagagtcggatactgactataaagagcagcaggtagacgtaaatgaaatcgttttcggacatataggtgattcgtatgaatggcatatcactgacataggagatacacctatagctataccactgccggtaatcgtaaaaagcagtacaggatggcacgcttttctttcttctaagtttgaggaaggaaacggagagtatgaaggactgtacattgctaaagacggtgaatataaaggtaagatagtggaaaaggatgctagcggtaacgaagtaaaacctttggatatctctattacaaagaatgttaccgggttgtttgtcaatagtaccattctggtgattctagtgttgagttgtgcccgttggtacaaaaaacatccagtagaaaaggaagctcctaaaggaatggtgggcatgatggaagcttgtatcctggcaatcaatgatgatgtgataaagggttgtatcggtaaggattataagcgttatgcaccttatctgctgacggctttcttctttatcctgatcaataatctgatgggattgattcctttcttccccggcggtgcgaatattacaggtaatattgccgttacctttgtgctggctatctgtacgttcctggctgtgaatctatgggggaacaaggaatattggaaagagattctatggcctgatgttccttggtggttaaaggctccgttcccgatgatgccgattattgagattttcggaatctttacgaagccatttgcattgatgattcgtttgtttgccaatatgatggccggtcatgctgctattctcagtttgatatccatcatttttattacagcgaatatgggacctctgattaatggttccatgggatttgttgcggtggcattcggaatctttatgactgcgctggaattattggtcgcatttattcaagcatacgtatttaccatgttgtccgcggtctttatcgggttgtcccgtacagaagagatgcgtgaagaaaaagaaataaaataaattaaataattaattcaaaaaacaaactattatgttactagcagttttattacagtccgctgctgcggcaggtttagggaaattaggtgctgcacttggagcagctattgcagtaatcggtgcaggtatcggtatcggtaaaatcggtggttctgccatggaggcaattgcccgtcagccggaggcggcaggagatatccgtatgaatatgattattatcgccgcgctggtagaaggtgtggcgctgatcgccattattgtttgtttattaactttgttcttataattaatgtagcatgtcattattaacacctgatagcggtctgttattctggatggtcatcgttttcggtatcgtttttatcattcttgcaaaatacggttttccggtgatcaccagaatggtggatgagcgaaaacaatatatagacaagtcactgcttgctgcacgtgaagccaatgagcaattggctaatattaaagcagacagtgaaatgatattggctaaggctcacgaggagcaggcgcgcatcctgaatgaagcggtcgcaacccgcgaacgtattctgaaggaagccaaaacacaggctcaggttgaaggacagaaactgctggatgaagcgaaaaagcagattcaggcagaaaaagacagcgctatcagcgacattcgccgccaagtagctgtgctgtctgtcgacattgctgagaaggttttgcgcaagaacctcgatgatgagaaagaacaaatggaaatgattgaccgtttgctggatgaattaactgtttctaaagactgattgttatgtatataggagtcatttcaatgcgttatgctaaggctttgctggcctatgccgacgaaaaggggacagaggatactgtttatgaggaagccggaatattggcagatagtttctcgagaatccccgaacttcgacaggcattggataatcctgtattgcctgctgaaacaaagttgaaactgatttgcgaagctgccggaggaggtaaggtgagcgaagaattgaaacgctttgtggaattggtactggaggaacgaagagagaaattcttgcagtttatgattatgtcatacattgacctttatcggaaacagaagaatatcagcgtcggtaaaatcacgactgtttgtccggtggcggaagaggtagtcaaccgcatacgggcattggtcgtagagaaaactcatggaactgtagagttcaaaaccaaaatagatccgaaactggaaggtggttttatctttgaaatcggaacttacagattggatgcgagcgtagctaaccagataaaacgggtaaagcaacagtttatagctaaaaatagaagaatagtataaaattaaaaattataagttagaaaataaaagtaatatcagtttgtttcttttagtttttaacttaaggttaatacctggtcgggctttaatttttaattttcaatttttaatgtaaaaagattatgtctgaaaatataaaacccagcgaagtatccgaagttttacttcagcaactgaaaggcatcaacacccacctgcaatttgatgaggtggggaatgtgctgcaggtgagcgatggtgtggcacgtatttacggtctgcgcaacgcggaagctaatgagttgctggagtttgaaaacggtatcatggctatcgtgatgaatctggaggaggacaatgtaggtgcggtattgctaggtcctactgatcagattaaggaaggaatggtggtgaaacgtaccaaacgcattgcttctattaatgtgggcgaaggtatgttagggcgtgttatcgatccgttaggcgtaccattggatggccgtggacaaattggcggggaactgtgcgaaatgcctttggaacgtaaagctcccggagtgatcttccgtcagcctgtgaaccagcctttgcagacagggctgaagtctgtggatgctatgattcctatcgggcgtggacaacgtgagttgattatcggggaccgtcagaccggaaaaacctctatcgctatagatacgattttgaatcagaaatccaactatgaagcgggaaaacctgtatattgtatttatgtagccattggtcagaagggttccactgtagcaagtctggtgaatacgttgcgtgaacgcggtgcgatggattataccatagtggtagctgccactgctgccgatccggctgcattgcagtattttgctccgtttgccggagcggctatcggagagtatttccgtgacacaggccgggatgccttggttgtgtatgatgacttgtcaaagcaagccgtagcctatcgtgaagtatccttgattctgcgtcgtccctccggtcgtgaggcatatccgggtgatatcttctatctgcattcacgattgttggagcgtgcggcaaagattatcaaccagcaggaagtggccgaacaaatgaatgaccttccacccagcttgaaaggcaaggtaaaggcaggtggttcactgaccgcattgcctattattgaaacacaggcaggtgatgtttccgcgtatattccaaccaatgtcatttccattacagacggtcagatattccttgaaaccgatttgttcaaccagggtttccgtccggctatcaatgtgggtatttccgtatcccgtgtgggaggtagtgcccagatcaagagcatgaagaaggtggcaggtacattgaagatagatcaggcacaatatcgcgaactggaggctttctccaagttcagcagtgatatggatcctgtaacggcaatggctatcgaccggggacgtaagaacaaccagttgctgatacagccgcagtacagtccgatgcctgtcggagaacaaatagccattctttattgtggtacacatagtttgctgcgtgatgtacccttgcataaggtgcaggatttccagaaatcattcctagaaatgatgcgtgccgaccatcagaaagatgtacttgatgtattgtcaagcggtgtgataaatgatgatgtaactgcaattatagagaaagtagcagctgatacggctcaaccatttaaagtgaacgaatagtcatggcatcactgaaagaagtaaaaggaagaatagcctcagtaaataatacgcggaaaattacttcggctatgaagatggtagcctctgccaagttgcataaggcgcaggctgccatagaaaacatgcttccttacgaacgaaggctgaatcacatcctgaccaattttctgagtgcgggtagtgaggtggagtctcctttcattgtgaaacgtgaagtgaagcgtgtggctatcgtcgtgtttgcctccaataccagtctgtgtggcgggttcaatgcaaatatcatcaggcatctgacggttattctggatgaatacaagtccctgggtatggagaatgtgcttttgtatccggtaggcagaaaggtagcggaaggtgtgaagaaattgggattcaaggccgaaggcgatttccagcatatggcggataaaccttcttatcaggaagcttccgccttggcagaggacttgatgaggcgctttctgcatcgtgacatagacaaggtggagttgctgtacaaccattttcgttctacagcagtacaggtcctgacgcgtgaaacttatcttccgatagacttgacacaagagaagaaagagaaggacaaaggcaggatacccgattatattgtggaaccgtctgtaaatgtggtgatggaggaattgctcccgaagatgttctgtatgaagatgttcacggtattactggattcgaatgcttccgaacatgccgcccgcaccatggctatgcagattgctacagacaatgcgaatgatttgttgcaggatctgacggtgatgtacaacaagagtcgtcagcaggctattaccaatgaactgttggatatagtaggcggttcaatggcctaatttttttcttggggcaagatacgcagcatcttgccccaagaatttgaaaatcatacgacaagtttatcggaatccttctataagtgtcatcccttccatcgaaggcgggttaaataatcatagtgctccccctctttaataagctccgcctcgaatccattcccggcagcatacaggctgagtgtctgaaaatcgacataaagccagtcgaaagaatctccttttatatttttgtattgcatccggaaatctatttcaccataataatctcctgccagatcaatcaggaaactcccgtcctcatcttcaaaaagataacggagatcactggaatccatcaagatacatcccccggggcgaagcagttgtttcatcttttgaaagaaagctgccatattttccaacttcccgataatgcccgatccgttcatcagcatgatgattgtatcgaatgtttctagaaaatgtgtatcgaaaagatttatctgacggacattctttacccctcttttttccatcacctctactgaaagcggggaaatatcgatagcgcatacctcttttcccatctcttgcaaggccagtgcatggcagccgcttccggctcctacgtccagaatatttccttcggctatttgtaaggcaatctgttccagttccggcatttcgtcataagggcggaataattgattcatgggtatttcgtcttcctcgaactgtgaggaaaatacacgtaacttatctgctttgcggtggttgaaataatcggcgatggcagctcccatcgggtctttatcgggtgaaagcaagtttgttttcatttggaatcattgtttgttgttgaagttgcaaaggtaggcaatttagtggagaaaatactaaatgtttgtgtaagatataaaccttgtcactgtaacttatccaatctatcatgaaaaaaacagtaattcagcaaaagaaaaaatacattctaataagaaatacatccttttttcagatctttgcataagaaacaaggagtgattggtggtgaatacgccactagttgatcatcattagtcgataatttttatgaatacattgaaacctcgtatagcatctctgttacaacaactgaatgaaagggtttttgagaaagaacatattgtcgctcttgctctgctttcggctgtggcaggagaaagtattttccttttaggccctccgggagtagcaaaaagtatggtaggacgccggctgaaactggcattccgcaacgcttccgcatttgaatatctgatgtcacgattcagtacgccggacgaaatattcggccctgtctccatttccaaactgaaagacgaagatacgtatgagcgtattgtcgatggctatctgccttctgccaccattgctttcctggacgagatatggaaagctggaccggccattcagaatgcattgctcaccattatcaatgaaaaaatataccgtaacggacagttctccattcatgttccactgaagggactgattgccgcttccaatgaactgcccgcccaaggacaaggactggaggccttgtgggatcgtttcctgattcgctgtctggtgggaggcattgaggatatgggagaatttgaccggatgatttcctctacggatgaaacggaaccggtggtggacgagcaactgcagatcaccgatgaggaatacatccggtgggaaaaggagatggctgccattaaaatccattactctattttcgaagtgattcatgccttgaaggaccggatagagcaatataacctccagatacaaaatgaggggggtgtgtcgtctcctctgtatgtgtcggaccgtcggtggaagaaaatggtgaagctgctgaaagcttccgctttcctgaatggatcggacactatccgcctttcggactgtacattgctgtcctattgcctttggagtgagatggatcagatggaggcggcagaggagatggtgaacgctgccattcagaaaagtgccgaaggctatctgctgaatataaaagggctggaacaggacattgaagaactgaaagaccgacaatcgtccgaacacagtttgcgtgaagtgaacgatccgggcatacaggtcattgatacttactattaccaggtagagggcgtccggatgaaagagcgcctccttatttttgcagccgactatcaacatctggatcagaccggtaaattattttatttgcataaggataaatataaggccaactgctgtattctgaagaaatatgattccatactccatgccaaagttccgcgtaataagatatatacgctgaaaaaagggcttcgttccatttatatcaataattatgaatatcacttgatgtgctatgaggattgtcctccaccgccacccgaacccgagcaggaggatttcggaaccaaatataaatcggtggccgaagcgttggacagagtggagaaggattggtccgggctgctggatgcggaaacggaatattatgagaagcatttatttctcagcgaaaagcagcgggcttccatgcggaggatgcttcgccaccagaagaataccatagaccgatataagaatgatttgaacgaaatggcagatgcgtaccgaaaagagaaccaggaatataaggttgagagatctgaagataatctattctcaggaactgaaagataggacattcaaagcatacgaggaggatgtaagcaacggggtggtgcgtcaacgcgaactggaagagaaagtgttgatgtactatcggcgtaccacaccttctttgcaggaatattattcccgctacactccggagtgggaggctttctactcttcggaacatctgccggatatggcatttttgcaatatttgaagcagatgcgcggtgctttcaaaaagaggtatgaactggcggaactgaatattgactattatatcagcctgttggagaatgcttctttatggaaaggagagggaacccggaccaaggagttttttttggataaatggcatcagttgcttacccgcaaagagtatgactatcagtacatgcatataaacagtttatgtgaaggttttgatttgttgatccggaaacaaggaaaggaatcgggtaacaaactgttgggctcgcgcatggagtggctgcttcataattatcctgatttgtaccggaggatacttccgtatgaaacagtgatgaagcgcaatccggctatccaacaattggcgcgtttgctgggcaagaagcatcgggaccaacaaaaatacgattctttgtcgggggtagataaaaagaggctgatcagacactctccgcatagtgatatcacaggggtgactttgggaaatgacctgaatagtttgttgcccatcgagtattgttatctggctgatgatgcgctgcgtgccgtatttatggaacgatatgccgaaaagagattgcaactgttcgattaccagtccaaggtaacggaacaggtaaaggatgacaagcataaggtttcgggacaaggaccttatatcatctgtgtagatacttccggctccatgcagggagacagagagatcttgtccaaatcggctattctggctatagcgcaactgacggagaaaacccatcggaaatgttatgtcatcaatttctcggatgaggctgtgtcgttattgattgaagatttggggcgggatatgcccaagttggcggagtttctgaataaacgttttgatggtggaacggatatagagccggctcttcgggaagctgcgcatatcatcaacggaaatgacttccgtgaatcggatatcgtattgatctcagatttcgagatgccgcctttatcccgtgatttaatggaacaggtaaaagtgattaagcggaggaagacttctttcttcggattggtgtttggcaacaagcctgaaatggaatatttgaatctttgtgaacgttattgggaaatgtaagttacattcctgttacataaatatgaaatgaatattgctgcttgtgtggacctaataacttcataatcaaattaatggttattcatttttagtataggtcattccttttatttttgctataaagtaaaaatagaagaagaaaatgaaaagaatgacttatgttaaagcattgatgtgcctgttattcccctctgctgctttagttacccgtgcgcaacacccggttgccggggatttgaaatgtaaactgaccggacgtatgcttatggatggtggcgtttatttaaagaatgacaacctgtttggtaacggtacggagtttaatgacttgcggttgggggtgaaagcgacctatcagaactggagtatgaagatggaggtaggttatgtagggaataaagtttccataaaggatgcctttgctgcttatacttcgggcaagcatattattcaggtgggacaattctatgaaccttttacattggacatgttatgtagtacgtacgaccttcgttttcatcagtcgccgggaatcgtgctggctttgaccaatagcaggaggatgggaacctcctatacctacaatggaaaacattattatgcttccggcggtttctttacagacagtgacctgggtaatgtgaaaaatgtttcacaagggtatgccatagacggtcgtttggtatatcgccctgtaaacgaagagggaaaattgttacacataggtgcagcggtggtgtatcgtactccggatagcgcgttgccgggagatgaagacgagaatacgtttatttataaatctccgggggtgagcactattgataaccggaatcttatttacgccaaggtagatcatgcaaagtaccagttgaaacaagggttggaattaatgatcgctcatcagaggttctttttgcaaggggagtatatacgaactatggtgaagcgtgaacagaatttcacaaattatacaggacatggcggatatgtgcaatgctcctggttgttgacaggcaggcaatatgggtatgatgaagcattggcttgtccgggcagacctgtggggcgggcattggagctgtgtggaaggtttaatatgcttgatatgaataatgaggaagccggtgtatggggaggggctcaaaaggatttttcattgggcatgaattattacatgaataagcatatagggatgaagctggcttatagctgggtgatgccgggaaagcatataaaggagattagtgataagaatttcagtgtcttgcagctccggttccaaatgatcttgtaatggaagaagggtaaaaacaaattcgggcgcaatcattgcgcccgagtcataaagctatatttattttttattttgcgacggtcttgatagcttcaatcaatctgctgaaatcttcggggaacacatcaccgatgtttccgatgcggaaagtatctgcttgagaaatctttcccggatagataacgaatcctttttctttcaattgatgatagaattccttgaaatcgaactccttgtcaggataaaggaaggaagtgatgataggggattggacttcatctttcagtaaggtcttgaatcccaatgatcgcataccttctaccagcacatcatgattacggcagtagcgtgcatgccgggcttccacaccgccttcggctgccagttcgtccatggcttgtttaaaggcacgcactacatgtgtaggagaggtgaagcgccattttccatgtcctttctccatcgcatcccattggtcgtagatgtccaaagaaagactctttgatactcctttacaatattgtaattcggatttacgtgcaatgatgaaaccaaagccgggaactccctgaatacatttgttggcactactgatcataaagtcgatacctaattcctctacatccaatggtacgccgccaaagctgctcattgcatccactatcagctttttaccatgcatctttaccatgtgggctatttcctttaacgggttcaggataccggttgtagtttcgcaatgtaccactgccacatgagtgatttctgcattgtgtgccagataatcatccacatactccacagatacttgttctgtttcatcaaaggctagcatatcatagttcattccatgatattctgcaatgtttcccatgcggtctccgtatgcaccgttgctcagaatcaataatttgtgtttgggcgtaatcacacttcctaaggtcgcctctacacaataagtaccgcttccctgcatcaggatgctggtgtagtcatctgtttttcgtgtagccagttgtactaatcctttacgtatttcctctacgatgtgaacattgtagtcttcatcccatgtgcaccagtcggtcatcatggctgtttttacgctttcagaagtggttaaagggccgggggttaaaagtaagtatggtctcataatcatttaattcattttatggttaataatttcaataatttcgggaagttcggcaatggtgtttactacataatgcgcacctgccatatacatacgttttctgactgctgccatgcgtctgttcaattcttctgcaggcagttttccggtttcctcttgggtgagtcccatttcgttgctgcccagaatcacaccgacagtccatacaccggcattcacaccttctttgatatcggctatcgtatcaccatattttattacgctttgaacggaaggtatggccagatcaatcatgttctggtaaatcatgtagggttgcgggcgtcctgccggaaggttgttggaagtcacacagttgtctgtggtatagccatgggcggcggcaccgggcagcacaatgtccatcatggcagtagtatatccggtggtggaacctatcttgataccgtcccttttcagtttctcgattacttcgattacaccgggaataggagtcgtatattcttccagggaggcgaacaagtgtttctcgaattctttgtatatggataccacatcttcctcagtccagttgcggttatagttttgtttgaattgttccgtcacacttggtaacttgaataattcacggatatggtctattttggtcatacccatggggcctcgtgcttcttccattgtcactgtcagtcctttctcggcaaaagctttcaggaaagcggctaccggagcgaagcatccatagtctacagccgttccggcccaatccataataatacactcaattttcttcatcttcttgtttgttgtttatttagttatacttttatttttatgttatgggttacagatgttttctgctgtttcctttaagttggttaacgccatcggtgaaacgatgatctttttatttttttcttcttttctcagctgtttttccaatttataccgttgcatcagatagatggccgaaccgatgaatgcaatgctgcacacaatgcctacccatcctgagaactgattataaaactccatccaattgatatccgggctgcaaaattccttgaacagcagtacacagacagttcctgtatatccgataaagtcgatggtggcaatgaagaatcccacatttcctttaatcttgaagcaggcaatgaagcgctcgaagaacagagtttggaaactaagataaacgatgtacaggctcagactttggaggaacagccagtaaagggtaggcagttgcaatgcatcataattaaaagccagatagctgatagtgcccgctccaccaataaccatagccagaagcacctgcaatactctgtagttgctgtttattaacgacatcatggcaaagattcccaaaataatcagcgtcaccataccgtccacttgtgcgaacaaccaagaagaaatagtgcttacatcaatgatattgaccagaaaatcttcttttatatcacgtaaaatagtgataaacagattggcgaagaacagcatgatcagcaagggcatataacttttgaacagttgtctgcgttgctctccgttcaaagtgacgcgttccgaacggagagcgcggtcttcatctgtgggttgtggcaacttgttgagcgaccaccccatgaggataaggagcgggaaggctaaaccacctatcagggcgggcatccagaattctgtgacaccaaatgtattgactacaaacaatcccatagatttagccattcctgagctcaccgccatacttacccccagcaagctggccaatatatcggtaactttgcgtccttctatgaaactgaagatgactccccacatgcatcctaatgccagtccgttgaagaatagggcaaacacattaaagggttgggggagtaatccgaagaagactaaagcgagttctgcaagggccacggagaatatcatgaatttcaaccggttttcgcgtttcaattctgaaacaatcttgatggcaaagaactttgaaataaggtagccgaaaatctgcatgatggtagtggctactttataatccatcccgaagaaatccattccgtcaaaggtggcagctgtaaaaggtttgcgcagggcatacaccagtgagtatgacagtagtgccgcccctcctgcccacagaataaacaggaaactggatatctgtttgtttgtttcgctttttgcttccattataataattgatattgactaattgttttgcttcttttctttgtagaaacctcattcctcgtatccttggattgctgtttccggaagcaaaagtaggagcctttcgagagagaaaaaatgaatctttatgattaatatttttcatattccacctgttgtatgatgtaacattaatgtaatgtatatgtcattgtatgttcatataaaaacttgtattttgcaaattcaataaagaagaagagaacaatgaatgatttgatagaaatataccgaagaatagaatatctccgtaacaatggtttgaaaatgaaggagatagcagattatgtagatatggctcccagtgtcttgtctgctctttattccagcgttctgcccacttatgtaacctcattgaaacaaggacactctgaagaagattcattagatttggctttggcgcaggtcaataatgtgtcaaaaaaacgtctgttgggcaatttggcaagtaccaaagagttgcttttcagtttggaacctgccaatggtgaggcaaagaccaatccttttatggagatgatgactgccgagatgcaacgttccgtgcaggaagtttataattatagcggaagttatctgagctatagtctttcttcttcgtgccaatgccttaaagtggagccctatctgatagaggcttccgaagataatacgtatgtgaaggtgactcacatgagtgcctataatacaactcatcggggagtggggttattcaataatcatcagaacgggtatattttctttaatgagcgtgagtcaccgcaaatggctttgttcagtatttatctgcaattgccgatgtatgattttccgccgttccttaaaggtttgtatcttagtctggattacaacaggaatccgatagcgcgtcgtatcttgtttgtaaagcaaggggatagtacagacatggaggaattcttggaactgaaaggggagctggttccacttgataagttgacagaattacaaaagaagtattatggctatacttgtcaggagggagattgtatccgtacctgcatggttccgtctccccaattgaatgaaaatgatttggaaagggaaaaaaagattttgtctttatgattcgtacattggaagcggcttgtaataacaacatattgcatccagtcctgctgcataaacctcttctcttccctgattaagcctttttatacggatgtattctatctccatagtctttggagttatctccataagctttggagttaactcccaaggctatggagttaactccaaagacttgcggagataaaacaaacaggaagaaaacctttaaccatacggcaggaaaggtttagagatatggataagatcttttaaggatgaatcagattacaaagctacgcgttccttatggaggaatacccttttgcagacttgctcgtccactatagggatggatttcattccattcctgcaatggatgatgtttttgcttatgatagaaatgtacttatattacccgatgcggaaatataaagtttatgcatggcacgagtacaggctacatataacatgctgcggtctatttctgttctatagtctttatcagttacaaatggaacaatcacttcgtcaaattccagtccctttgccatgtgggctgtagtaatgaccaccccattgacaaaagctacactttcttctgtcagcaaacagatcttatcagacaaatgattgatggctgcatacaacttgtccgcttgttttacggttttgcatattatacccatggatacatcagctccttccaggaaagaggtgatgaggttttctatccattctatctctttcttttctgtgggaagcaaggcgactgccggttcctctccatgacgctctatagcttccagttcctcgttcttggcaatgcgttgggcaaactctgtgatttcatacgtggagcgataacttttacaaagcttcatcacttccgagccgactaatacacgttggatctgttcgcaggtggtggaactgtatggatttactgattgctttgcatctcccaatattgttttccggcaagggaataatttagccagaactttgtattgtatcggagtatagtcctgcatttcgtctaccagcagatgcttgatgccatacatggttttattatcttccagggccagtttcaaataaagtaatggggctacatccgcatattccaatttccggtttttaccctgtttgaacatttccggttttcccagccagtcataaaatcccttgtacaagtcaaggtctttattgttgaacatctttttcagttcattacccaactgccgtatctgtatttttcccatcggctcttggtgataggtgaaagtcagttcgcgggcaatttcttctgccattggttggaaacggctgcgcatgggcaggcggtgccatgccgcgaaacgttttttcaggtactcggcagggatagggatacgtcctgctttcaggtcggttggccgaaatgcgttttgttctaaatatagaatgtatttatccatctgctggataaactcggtggtggatttgaatcggatacgttctataaaattttcttcctctttgtccagtatttcggccacctggtcaaagaaggtttgtattttatacttgttatccagtattttgagcattaattcctcaaagccgcattcttcaattttttcttctcccaattcgggaagtacgttcgagatgtaatcggcaaatactttattgggggaaatgatcaggatatcattggacgtgatttcccctttgtgccgatatagcagataggctacacggtgcaaggcgatggatgtttttcctgaaccggctactccctgaataatcagggtgttcgatgtatcattacggataattttattctgttcccgttggatggtggcgactatattcttcatccggtcatcggagtttccactcaattctttctgaaggatgtcatcttgaatattcagtgaactttccagcatgaattccatttttccgtcacggatgcgatactggcgtttcagacggatgttacctttcacttctcccgagggggcgtcgaaatgtgcttctcctaattcataatcatagaacatgctggagatgggggcacgccagtcgtgtatcagattttcattggtgggaggattgaaaaatgagtggatacctatatataatggcaggacttcgggttgccctttttcttgaaagtcgatgcgcccgaaatagggaatggccatcattttgcgataacgtttctttttctcggccaaggactcactggctgctacttgttgggtgactatctgccggaccgcacttttctcggcgcggtccagttcggacagattttcccacaagtagagtttgtgctccattacgtctttggatttatcttcaatggccttatccatctgttcgatattggcagctagtaaagcaataatatccatgagataggctttctcttccttttcagtctggttaaatatcatagcgcgtatttgtttgtcgttttattgctgggcgaaattacacaaatatgcttaatgttattctctttgtatggagaaatgtggatgtaaatttgttctttgtccggttgtttggataactccaatatgaatattgcaggaatgaaagctggtcttttctttgtggaaaaaaggtggaagactttcacaagttccccaccccaaccgtagcaggtacatgtaaaatatacctgaaatgaaatgatttattattttctgcttataggttattacagattgtttttacataaatataggcgccatatatttcaccagaaagtatccgccggctatcagccatatatagagaatcgaggcaaggacaaagggctttgctccggccttccggaatttgtcgatactggtttccgcacccaaggcagtcatggccattgtcagcaggaaagtatctacattgttgataaaggcagtcaggctttgcggcagcaaatcgaaagaattgaaaccgatgacagccagaaaaccgatagcaaaccaaggaatggagacttttttcatacttccattttgttctccggctttaattgccggttgggataccatgaagctggtaatgagcagaacgggaaccagcatcattacacgaatcatttttacgataatggcgacatcggaaatttctttgcccattgcgttgccggcacctactgtgtgcgctacctcatgcaaggtcgctccggtgaatatacccatttcattggcagaaagtacgaatgtgccattatgatataatataggataaatgaacatggatatagttccaaaaataacaacagtggaaacagccacggctgttttatagggtttggtttgaatggtcgattcagcgcctagtatagctgccgcaccgcaaataccactgccgatggaagtgagcagtgcgatgccccggtccattttcaacattcgtcctatcaggataccccctagaatagttgttgttactataattgtgtcaataaaaatagcgggcaagcccactgcaagcacatcttgaaaagttaatctgaaaccgtaaagaatgattccgatacgcaagattcgtttagaacaaaactggataccggggacccatgtctcaggcaaattattccggaggctgttagcatataacatacctaaaataataccgacaatcatgggactgaatgataactcttttacaaagttcatttcgcctatataaaaggccgcacatgagaacagggtgatcaagagtaccccatggagcatactgcttcttttttcgcttatcataatttatttttttatggtgtttaaaagtgtcgtacaaaataacaactttagattgggatacaccgaattaaaattcttatagcctataacctttaattatcaaagaagaagaatgttcacggaaaaagaataatgcacaatctctcaaaaaaaagattgtgcgttataatatagatatatacagatcgttgttactggcttttatagctgtttatctgagattaatcgtgcaatgcgggtcttgttctgtgttcctttggtaagcaggtaaacgtgcttatacgcatcacggttcagttcggtaggcgaaccgttgataaggataatgttccggtcattggcaaatttcaggatgccgctgatgttgttgggatgcagtttgcctatttcatccatcatacagtgcaatttgaaatctttgaatttgcgtgacgccccttccttgaacacattcagcaacatgatgtttatcatcgcttttaccagaatgtcggttccttccgaccccacattggctatcttctcgataaatccggtatcattgccgttctccacaatgcggaaacgcaattcgaaggaatcatacaggcggatgctgtcgtagcggtaggcatgtatttccttgataaaggtacgcagcaaagtgatcgcttcttcttttaccaattgctccttggcagaggagaacaggttggtttccggtgagaggtcatagccgtaatcatggtaatatttctgtatctcacgcagaatattcactacgcggttgctgctctcttccactttcatttcaatgcgctggataactcctacaaagttgcaggtagcgaaacctttattgatttcacggatcacatcttgaatatcatcttctgatgaagtcagcatggaggtatccatactgatacgtttgaaggtatcccaatgttcattgttaatgcgacggatatactcgtttatgcggttctcttccacaaagtcgtgcagctcgtcggcaaagcgtacatattcccagtcctcgttgaattttacgcggaatttgaaggtgttgtcctcatcaaaatgtccggtgaaaaggttcacttccttgcggagtttgctttgtacctgtgtgaattggttggcttggcgggtcagttcgtcaatcagctccatacaagtcttggtggtttgtatggtctgtgcggtttcagaatggaatatatcctgatgcggcttgtaccagtcgtatgccgaaatcttactgtaggcttccaagttcttttgcaattcccttacattttcttccgcttcttccagttctttgttcagaaggtctattttttcttgcagggaagatgtttccgctctcagcgtttcccgttcctgctggagcagacgtttctgttcgtcgtgttcccgttgccatccggggatacggtctatcaagtcccgtttatctttctgatattcgatgaccagtgtcgcgttttccttaatgaaagaaagttctttatccagttgagccagttggttggcaatatcttgcaaacgttcggtatccgccccctgcgagtgaagctctttttgcatatctgcttcatattcagctttgatggaggagattcttcgttgctcttctttttcttcctttccgataatttccgcctgtgtctttttttcggtggcaagcgtttgctgctgctggttccatgcctgtttcagattatccagtttttctgttttctccttgttcaggttttttagtttattgtttattccttccagttcggcagcccgtttgcgcttttcgttttccaattggtttattttggtgttccgttcctcattggctttcttcttccattcttccaagtcgagcatatcctgctggtattggcgttccaattgttccagttcatactctatttgactgatgagatttttttgctcctttatctgcggttggtatttgcgtttcagctgctcctgcacttcttccttttcagtttgcaggcgttgcatggcggcagtgatttcttccagacgcttttcaccgttttctttctcggctatgtagtcgtctatagacttgatgggacgatggatgctgtctaaatttatggaaatgccatagaatgagtttcccccctcaatggtaatttgcgggaaaagtccccgttgccataaaatactttcatcacacagtttaccgatggtctcttcccatccttttttgttttctttcagccagccttgcaaggtgtctttgctgttgtccagaaaagcttgtaattcgtctatacgaggacgcagttgcagcatttcctgttgcagtttctgcaaggtcaagtctttttctttcaactgtttttgctgttcctcttcccaagtcatggtcagttccttgatggtgagctgcgcttgggcgatacggtttttccgttccgtgtgaaagttggcatagttctggatgcgcgctttcaattcctgctgctcttcctcaaagaaaatttcctttctgcatagttttatctgataatccatggcattcagttcactcagtttctcggctttcagcggatggagctgctgtgacagggtttcaaattcctgataaagggaatcggtgaagcgctggtattccttgcgagcctcttccagacgctcgttgtacgtattgtttaacgtgtccagttgcttgatttttgcttcatgaatcttgttccattgctcgtccagggtctgaatcagtgatttatacttggtggagatttccatatattgtgaggtgaggatgcgttgctcttccagcaatcccacctgccggttcttccattcctctttcttggaagagcgttctataatctcttctatgttcttgttctgatagtccttttctttgcctaatgctttttgcagttcgttgttcagcactgccagggcttcctgtaacttgtcgctgcgcttgcgcgattcatcttgaagctcctgtttccggcgtatcagttttcccttgccggcatctgcgcggtcttgtttctctttccattggggaaggatactttcggctttgcgaaaagcggtgaccagttcgcggcagttctgcaccagtccgccttgcagttgggaggtttgttgggataatagcgtgatttccctagcttgtttccgggtttcccgtttctgaaattcttcgatgtccttcagacgagtctcaaagtttttcagatgctccttgtaactgttcaggtcgatggccgtttcatcttcgttcagagaagaaatgattgttctcttgataaattcagcatccagtttcgaattcagcaacacgttctgtatggtacgcggaatattctggtattgcttgctctccatcagcgagtaccggctgaactcaggacttgtactgtttccatacagaatgttccgatactcgtcgtaggtatagatgatgcgtgaatattctatgccatattggtccagcacggcacgcacgcggtcgctctcgctataggccacccggttctcgtctataaagaattctttgcggtaaggagagtggatgaagcggtaacatacacggttcatcgacttgaaattcagaatacagaacgcaccgttctctgttgccacttcgtaaacaatgtacgagttggagtaggggaaatagtaatccgtgtaattttgcttttccaccgaaatgcccagtcgttgcgtgtcggcattataaaagaaaaggatagcacgcagaatggtacttttccctactccctgcgtgccgatgaagtgaacgtttccgtccagataaatatcgtccgaataagggatattcgcactattgataaagattattctactcaggtttctcatcttcggtttcgtcgtaaatgttgatactttcaatcagtctttccagataatgccaggcactcatcaccttatacgtattcgttttctcgttttcttgttccagaaacgagtctttggtgagctggcgtatcatgttttccagtacttccttgcggatgtccttgtccgagaagtgtttccgcataccgtccagtttgttctggagcagcatgttaatgttggtttccaccaatatctgttcgggctggaagcggaatccgggaccgaaagtttcatcgtaagttttgaaaaagtcgagcacatctatccagtaataggcacgcatgattttttgttccagtgtggctttaggttctatacgcgagaagaagaaatattcgtttccacgttccagcgtatagtttatctgtgaaaaatactgatagaggggctcgtaattctcatctatttcattatacatatcgcgtacttcttcactggtgctgttggaactgatgaacagtcctttctgcaggtattcaaagatggacgcggtattatcgggtatttgtatatttaaatccataattctcagagtggatatattttagcgtattcatattgattgtggagtccgaactcgttccggatttccagttggttttcgtaaagtgagacaatctgacagaagaacgtggtgcgttccttttcgtccacctcgcgatggaagtgatactgcaacagaaaagagaaaaggtcgttgaccggttctcctttccaacgggcttctgctcccgactgcacaaaggcggtcactacttcgtccagattaatcacttcttcatacatggcctgtgctctcaagtcttcttcactgaaagccccggcttcatttttccgcacaatttcacggtacttctgattgctgataactttcagaatgatgggacgtgcttcgtcactggccagataggcaggcgacagtttgaacgatgcttgcggactgccttccagcaggagggaacgctcccgttccatgatttcggacaggttgcttcgggcacgcagctcgaactggtcttgcagatattttacttttcgtatcttttctaccagtatcacctgattctttatctggttcagataattgatgatatcctgttgggcacgaatcagactgtgggctgatagttgcagttcctgtcgcagttcgagcagaatgcgagtcagctcctcatcagtggcctggcggaagaaatctcgttcttcgtgcagaatcagatgttcggtagagtctatcaaccgctggatgttgattcgctttttgtccagattttgcagtttggctatttttatctggtacgtaggttcgtgtttgaaagcattatcaatattgtgttgaagattgataatgttccgtatcgttacacgtgccagtttctgaaaggtaatcttgatattgcgtacataactttccttgcgcgactggattttttccttcaggtagtagtccatcagttcgtgcaggtactctatgttttcctctacggtagcagtgttgatttcctcgtttgcttccagcagcagttcgaagaaatcaaggaatcgggcatccagttccacaaagtttccgttttggtgtatgatttccttttcgatgagtatttttaaacggttttcgtcttctttcaatagggtgagtgcgtccgagtatcgaaaactgtgtacttttctcttctcaaacatctctaccaacagccctttagctacaaaaatcgtatttataatttcgtgaattgaccggaatatatacattgtttttttcaaaaaagtccggcgaagttactccaaaaggttggaaaaacctagcgttttatgctaaaaagcatataaatagtgaagtaaaaggtggaaaatgctgaggagtaaattagtaagaaggaggtcgttgtatggagtttctgtcgcttgtatgatgctatatttttcagatgcggttgacacgaataacgtagttagaataaagatatccgtgccatcgtatctggaaaatagaatactttaggaactttacggtaaagactgataaaccgggtgcctatgttttagaactgtttagttgtgtgggttatttgcaggctagttcgaatatctctttactatattctttgttcagcttcacataattgcctacccattctcccttgttttcatgtagtttttttaccagcagttcaatgtcaggatgttctatacctagttctttgaaattgaccggtaagcctatgtatctgaaaaaatgtttcaatcgtgatacaccggcaagtgccatctcttccaaatcctcattttcgggaactccgaaaacacgatttgcaaactgggcaatcttcttcggattatgttctgccatgaatgtcatccatgcaggtacgataactgccagtcctgccccatgcgtcacattatatacagcactgatttcatgttccagaaagtgtgaagcccagtcttcctcacaacctactccgcaagtaccattatgagcaattgttccacaccacatgatattggcgcgtgcctcataatcgtttggattctgcttcactttgtatgcttctttaatgatagccattaaagttccctcacacagccggtcactgatttccacatcgggagtattggtaaaataacgttccataatgtgtaccatcatatcggcaatgccacaagctgtctgatagggggggagagtataggtcaattccggattcattacagcaaaaacgggccgtagtaattccggtacacgcaaacttagtttctgcagaccttccagtttggtaatcaccgtattgcccgaaccttcgctaccggcagcgggaatagtaagtaccacacccacttttaaggctttcttcactttggcttttcctatatagaaatcccaaaaatcaccttcgtagggcactcctgccgcaatggcttttgcggtgtcaataacggaacctccccccacgggaagcataaagtccacgccttctttgcgggccagttcgatgccttcgtacactttcgggtcagtaggattaggctgtatacctcctagttttacatattccactccggcctgttgcaatgactcttctatgcgttgcagtaatccgctacgaataatagagcctccgccgtaaacaatcatcacctttcgggcgttatactttttagcaagagttccggtttgtccttctgtatccttaccaaacacaaactcggtagggctataaaatacaaaattgttcatttgcttattccttatattattttgttatatgaaaccaaagcaaagttaaggaaatatattacctttgccgcctaaatttagtaaaaagatgaaaacggacattgaaatagcacgcagcattgagctggtcaaaattaaacaggtggctcgggaaaccggtattcctgtagagcacatcagtaactacgggcgctatattgccaaggtagatgaaagtcagatagatgaagaaaaggtgcagcagagtaaccttattctagttactgctatcactcctaccaaagccggtattggtaagaccactgtttctatcggattggctttgggactgaataaaataggaaagaaaacaattgttgccttgcgcgaaccgtcattgggtccctgtttcggaatgaaagggggagctgccggaggaggatacgcccaggttttgccaatggataagattaatcttcattttacaggtgattttcatgccatcacttctgctcacaatatgatttcggccttgttggacaattacctttatcagaatcgtgataatggtttcggattgaaggaagtgctgtggcgtcgtgtgttggatgtgaatgaccgttccctccgttatattgttacaggactaggaccgaagaccaacggaattacccaagagtcagggtttgatattactcctgcatctgaaattatggctattctgtgtctggccaaggatgaaaaggacctgcgtcgtcgcattgaaaatattttattaggttttacgtatgacaataaaccttttactgtaaaagatttaggagttgccggagccattacagttcttttgaaagatgctctttctcctaatctggtacaaactacggaacatactgctgcctttgttcatgggggaccgtttgccaatatcgctcacggttgcaactctattctggcaaccaagatggcaatgacttttagtgattatactattaccgaagccggattcggggctgacctgggagcggagaagttttatgatatcaagtgccgtaaagcaggtatcacacctaaactgaccgtattggtggttactgcccgtgcattgaaaatgcatggcggcgtatcacaggataagataaaggaacccaatctggaagctttgaagcagggggtggccaatatggataagcatttgcgtaatttgagatatttcggtcagacagttgtcgttgcgtttaaccgttatggggatgattcggaggaagaagtggattatatccgtacccattgcgagaagaaaggcgtgggctttgcagtaaacaatgcctttactgatggtggcgaaggggcagtagaattggcggaactggttgtgaaaaccattgaggaacaaccttccgagcctttgcaatatgcctatgatgatgaggatagtgtagaaactaaaatatcgaaggtggcttgtaacttgtatggggccagtatcattacctatagtgccgccgcccgtaagaaactgaaacatattgtagaattgggatatggagatttccctatctgtattgccaagacgcagtattcattctctaccgaccccaaaatttacggtgcggtagataactttgaattccatgtacaagatattgtgatgaatgccggagctgagatgctggtagtcattgccggagaaataatgcgtatgccgggattgccgaaggaaccgcaagcattgcatattgatatcgtgaatggtgaaatagaggggttgtcgtaacccctctatttttatttacactggtttacatcgatgagactaggcaccaagtgtaaatggaaagtccgatacctattattaatcctacagatgagtatcggataaacaatttgtctttatacttgcagccatagcataagcctacaatggcgcatatggatattccgattggaaatacaaagaatcccattgaggtaactccaatgagtataatgatacccatgatggttagaactttgtttcttgctgtcatggcttttattgtttggtgttgaatgtatatggattatatatggcagtaaaagtacaaaattattgtttagaatcagacttttatccgttttttatatatttgcattatctaaaaagtggatagatggcagatgtcttgactcccgaacaacgccgtaaatgcatgtctcggattcgtagtaggaatacaaaaccttctgtcagaaatgagaacctgaataggttattgtttacgctggaccatttgttcttggaatatttcgcagtacgtcatgcagtttcgtatggagagagcggtagagaattaaatttggttgcggccgaagataaaacggaatatgagaaagataagcctttataaaaattgaactaatcagtaacgacaaaatggatatgaaacatgtaaagtatctggctcttgtcctatgcatagggaatctgtcgcctgttatggcgcagacagcctcgaaaagtctcacagtagacaatttagttgcttggcagcgtatcagcgggcaatctatttctgataatggaaagtgggtggcatgcaagatggaaccttgggaaggggatgctgtggtgaatttgtatgatgcacaagggaaggaacttgtcactttcccgcgggcagaccgttttcttttctcggcctcttccgactatttggttgtgtcgcagaaacccggcaagatgatagtggattctctgaaaataaagaaaacaaagaaagataagttgccgatggatgcattggttatttattcgcttttgggcgacagggaagtgattgattcactgaaaacattcaaactggcagagaaggtggactgggttgcttttcagaagggaaggaaagactcgactttgtatgttcaaccgttgaatgcaaacctcagtactcggtatgaggctcctgctgtgaaagctttcaactttgcggagaaaagcggaatgctttattatataaccgcaggtgataaagcagaggaaaagccgggattgtatcttctgaatacggaaacaggtgtgaagacgctgataaaagaaggtgacggggtgtttaaacaggtaacttttgatgaagatggagcaaacttggctttcttatattgtgcacagaaaaattcttgttataaagccatgagcttgtggctgtcacagcagggagcaccggcaacagaagttgtggcacgtggcaatcaggctcttccgaaaggatgggtgattagtgagcatgggaaattacaattttcgaagagtgcttcccggttgttttttggcacatcgcctgagcctagacaaaaggatacgttgcaattggcggagaaccgtcccaatgtgcaggtgtggagttgggacgagccggtgcaatatactgtacagaattataataaggagaaagagctgaaaagaagctatcaagcggtttatcatataaatagtggtcgtatttgtcagctggcagatgaggagttatctcagattttgttgggagatgaaggagatgccccgttggcattgctttccacttcgcgtccttattcattgtcctccatgtgggaagggcggacacgcagtgattattacactgtgtctttggaagatggcagccgtaaattactggcatcggcggattatggcagataccgtctttcaccacaaggcaagtatgcgtattggtatgctgaaacagacagttgttggtatactctttctatggcagatgggaaaaaggttcagttgactacccctgtttctttcctcgcatgggatgaagagaatgatgtacctgactatccgaacgcacatggaactgccggatggacggaacgggatgagtcccttttaatttatgaccgttatgatatttggaaattcgatccggatgccatgaaggaacctgtcaatctgacgatgaatggacgtaagaaccggatttcatatcgtttggtaaaactggataaggaggagcgtgtggttgacctgaacaagccacagttgttgaaaggctttaacgaagtgaccaaagggaacgggtattacaaggctcgtttttccaccgctgcttctcccaaagaattgatagcgggtaactatatgttacgcagtatttataaggcgaaaaatacagaccatgtaatctatacgatggaaagttttgagcaatatcctgaccttcattatgctacactcgatttcaagaaatctattcggttgactcatggcattgaccaacagaaagactatttgtggggaactgctgaattggtttcgtggatatctttagatggtcgtaagttggaaggggtggtgtataagcctgctaattttgatccggccaagaaatacccgatgattgtgagtttctatgagcgaaattcagaaactctgtttaattaccggatgccggaaccgcatcggtctaccattgattatcatttttataacagtaacgggtatattgtgttcaatccggacatacgttatgtagacggttatccgggtgagagttgctataactgtctgatgccgggggttgccatgctgataggcaaaggttatattgacgagaaagccataggtgcgcagggacatagttggggcggttatcaagtggcttatctggctacacgtactgatttgtttgcggctattgagtcaggtgctccggtggtcaatatgttcagtgcttacggaggtatccgttggggatcggggctggcgcgctcgttccagtatgaacatactcagagccgtctggccggtacgccttggagtactccgttgcgttatttggaaaactctgctctgttcacgatggacaaggtacaaacacctgttttaattatgcataatgatgctgacggacatgtgccctggtatcagggaatagaatattttgtggcaatgaaacgtcttggaaagccttgttggatgctgaactatacaggcgaaccgcattggccgacaaagattgccaacaaaatagattttcaaaaacgtatgttccagttctttaatcattatctgaaaaaagaagcaatgcctgaatggatgtctgacggggttccggctgtagaacagccttatgaattaggatactgatattatgtgttcggacgactatagaattcaagctgttcctactgtggataaagtaaaaggatagttcctgaaaagagggaggaggtgtgtcaaaactaaaatgacagctccgaaaagttacagatagtaattataaacttaaaagggtcgtatcaagctctgtattgactaatgatacgaccctttctttagttttttaggatgctcaaatttcaaattataaattcatattttcaaaaactgagttttgatcctctcttcttctttttagtacaatgcttttttattcaaacttaccataacgggtaggcaacagtttgcggtcacctaatgtattatctacccgggctacattgatccagaatttgttatcacgtaccgattcgataggataagcggctttctcgcggctgtagctgtgattccattcattggccaccacttcatattcaggatgcggggcgttgaccaatacattatcttctttatcggcactgccattcttcacttcttgaatttcctgccagatggtttgcatcacagtgacgaaattatccagttcccataaactttcactttcagtcggttcaatcatcaatgttccatgaaccgggaaagaaagggtgggcgcatgatagccatagtccatcagacgcttggcgatgtcattttcgctgataccggtttcgtcatgcagatagcggcaatctaaaatcatttcatggcccacaaagcccgtagcaccggtatatacaataccgtaggtatccttgaagcaggctgccagataattggcgctcagaatggcagtcttggtggcattggtcagaccttcggcgcccatcatgcaaatataaccgtaagtaataggcaggattcctgcgctaccgtatggagctgaagaaacctgattggcactgttaccccaaacttgatgtcctggaagaaacgggaccagatgttcggctacacaaacgggacctacaccgggaccgccaccaccgtgagggctggcaaaagtcttatgcagattcaaatggcatacatcagcaccgatggtacccggattggtcagacctacctgtgcattcatatttgcaccatccatgtaaacctgtgctccgcatttatgaataattttacaaatttctgcaatttccggttcaaagataccatgagtggacggataggtaatcattaatgcagccagatcatccttgttggcttctgcttttgcacgtaaatcttctacgtctacattacctttatcgtcacaggcgcaagtcaccgtggtatatccgcattgaatggctgaagccggattcgtaccgtgggctgatgccggaattaatatcttgttgcggtgtccctgtccgatactttccagataagcgcggatgatgcgaagtcctgtatactctcctgctgcacctgaattaggttgcaaagtgattcctgcaaatccggtaataaccttcaactgctcgcttaggttattaattagtgtctgatagccttttgtttgatcctcaggtgctaacgggtgtatagccatccagcctaagttgctgagtgggagcatttccgaagcggcattcagtttcatggtacaagaacccaatgaaatcatggaatgtgctaatgagatatctttacgttccaaacgtttgatataacgcatcatttcggtttcagtatgatacttgttgaatacctcatgggtgaggaaggaagtacggcggcgtagttcacgattcagtgaggatgcttcgggaatgtctgtcacttcttgaacggtttcttcggcagcaatggagaagatggaaagtaacaggtttacatctttcaggtcggtggtttcatcaatgctgaaacctacatcgccattatcatagtaacggaggtttacttctttactcaatgcgatggtacgcagcttctgagccgaaacatggtcgggcagactgaaacgcagggtgtcaaagaataattcattatgctgtacatatcccaagcgggttagggctttgttcaaccaggtggtaatgctatgaatgcgttttgctatatttttgataccttcctgcccatgataaacggcatagaagccggccattgtagccagtaatgcctgtgcggtgcagatgttggaagttgctttttcgcgtttaatatgttgctcacgggtctgtaaagccatacggtaggccagtttgccatatttgtctttagaccagccgatgatacgtcccggcatattgcgtttatattcgtcacgtgtagcgaagtaggctgcggacggacctccgtagaacaaggggatacccaggcgctgggtacttccgaatacgatatctgctccccattcgccgggaggaactaataatgccaaactcattatatcagcatccacggctactttacaatgggcagcatgtgccttttccacaaactcacgatagtcttctacgctaccgctggcattggggtattgcaggatgcaggcaaaaatttccggagtaaataccaattccttgtaatttcctacttggatcttcatgccttgcggaagggcgcgggtttggatgactgccagattctgtgggaaaatctcttcatccacaaacaatacattggctccgcttttttgttggtcgcgggtgcgaagtccatgcatcatggtggcggcttcggcagcggcggtagattcatccagcaatgagcagtttgccaatggcatggctgtgaggtcggatatgacagtctggaagttcatcaatgcttccaaacgtccttgtgaaacttcggtttgataaggagtgtacgaggtgtaccacacaggattctcgaatacattgcgttgaatgaccgccggagtaatactatcataccaacccatacctatataggaggtataaatcttgttttgtgaagctagttcggtaatgtgctctgcaaactcccgttccgtcatgggagcagccagtggcagaggttctttcaaacggattttggacggaattgttttgttaatcagttcatcaagactctttacgccaatcttttccaacataacgggaaggtcttcttcctgtataccgatatgtcggtctgctaataaatctgttttcatggtagtagtatataagttaaattttaagttttatcttatcggaaaaaagggttgttcgctttttctgctcccacagtggtcgggtctccatgaccaggatagactaccgtgtcggggggaagtacaaacaaacgactgcatatatgttcgcgaagttcgtcgaaattacctcctgtaaggtctgcacgtcctatacttccttggaacaatacatcaccgctgaagatacagtggtcttctttgcagtaataaacaatacttcccggcgaatgacccggcacatggatagcttccagttgggtattgccgaaagtaatgatatctccatcaaagatatattttcctaatggcacgggtgcttcgggcaattggaagccaaacatacgtgattgtgccggggcttgttccagccaaaattcatccgcttgatttgcttcggcttttagtccgtattcttgtaacaggaatgggttgccgaaaatatggtccagatggaggtgcgtattcaataaatgtttcactgtcaggttattgctgtcaatatatctttttaaggcttgcttttcttcttcataaaagcaaccggcatcaataatgacggcttccttcgtttcgtccgataacacatagcagtttaccggaaacatattgaattcaaatttctttattttcattgttcttttatctatagttattaaccgttgatggttacataaaccactttcttagttttaaaaaaatcttctgtgaattcatctttcagatcataaagcattgttttgtgcttcacgggcattgtttcttgttccaactctccgcctttcaggcaaatcagcccgttgggcaggacgttatgctgttcttgtctgatgtttttacggataatttttattaaatcgcccaaaggcatgacagcacgacttactacgaagtcgaattttcttttttcttcttcggcgcggcaatgacggaaagtgacattcttcagtccgatagcattggctacttctgtagctactttcactttctttccgatactgtccaccagatgaaattggacttcagggaataagatggccaaagggatacctgggaaaccgccccctgtgcccaagtccataatttgggtatcaggggtgaagtttatcactttggctatgcctagcgagtgcaatacatgatgctcgtacagattagcgatatccttgcgtgagattacattgattttgctattccaatccgtgtataaatcatacaatgcggcaaactgtgttttctgctgttcgctgaggttagggaaatatttcagtattaattccattctatacttaaaatcgttatttaatgtatcatatatttttctaccgatgtgtagggtaaagaaagggtgatgattcctacagcatagggagcgatatcatatttgttatacaggaaagatactttttccttttctaacaagaaattgtcgggtacatacatattggtagaattcaagatgcctgcattctgaagtccttccagtgaggtaatggagctgtcttccaaacgggtagccatttctgttatcagttcttccagcagcatgtcacttatcggtttttccgactctgccataaatacatctttcagagcaagtagtttgccggtatttttttcgaagttcatccatttgttccatgagttgggatgtgctccgcctgtatattcaaaagtttctgcaatgaaattcagaatgccttctttgccttcgctgaaataggtggtcagtccgtattcataattgtaccatgtgggaagttcgtctttgggagttccattttttatatcttcctgatagaactcgttcacatctttgcggtagttgttaatgtaggtatttttaaaagaatctacagcgacttccggattcatccgggtatattcttttcccaaaatgtgggcttgtatggtgcggttgatgcgttgtactatgctatccgcagcatcagattttgctaaataactataatcaatagtaatctgacaggtgggagagactgtgtcatcttgtaaatgggcttgttcttccacctttacagtcttcactgtttcactatcaatttgtttttgtccattacatcccgataataaaaagcaggatacaaggcaagttgccataacagacaatacgagatttctttttttcataactttttgtttatttgcatggattacttatcctaactttctccacaaatatagaataacttcgtgaaatgtccatctaaaaagcgaaaatatatttatctgtttgcaacaagattgcatgaactttttgctaaatttgtccgttgataagctataataaataagtaaagaaatgaatatgaacgatatgacaaaaaaactatatcccgttacgggaatgcattgtgcggcatgtgccggcaacgtggagaaaattgtaaggaagcaagaaggcgtggaaaatgcatcggttaatttggcgacggctactttgacggtgacttataatccggatattgtgtctccgcaacaactgaaagaggctgtgatgaaaataggttttgatttgataatagatgaggataactctgtacaggagcaagaggaagcggagcaatcttattacggactgttgaagcggaagactatcgttgcttggatttttgctttaccggtagctgttttggggatgtttctgatgaatgttccgggagtaaactggtggatgctgttgctttcacttcctgttattttatattcggggcgttctttctatatgaatgcctggaaacagacgcttcagcgtaccagtaatatggatacgttggtggcacttagcacctccatcgcatttttgttcagtttgtttaatacgttctatcccgaattttggtacagccgcggattggaacctcatgtatattatgaagctgccactgttataatagctttcgtattggttggcaaactgatggaagagaaagcaaaaggaaaaacttccacagctattcgtaaactgatgggattacaacctcggacggcccgtgtggtgaaagacggcagggaagaggatatcttgatcgccgacctccaggtcggcgataaggtgagcgtccgtcccggcgagcaaattccggtggatggagtcattgtcggaggaaatacctttatagatgagagcatgataagcggtgaacctattcctgtagagaaaaagcagggtgataaggtgctggctggcactatcaatcagaatggtgcatttattatgactgctcaaaaggtggggaaaaatacggtgttggcacagattatccgcatggtgcaggaagcacaggggtctaaagctccggtccagcgtattgtggataaagtgacagcggtttttgttcctgttgttcttgctgtggctgtttttactttctttatttggatagtggcaggtggagcggatgacttttcctacgctatgctttcagcagtgtctgttttggttattgcctgtccgtgtgccttgggacttgctactccaactgcattgatggtaggaattggtaaaggggccgaatcacatattttaataaaggatgcagtagctttggagcagatgcggaaagtggatacagtggtacttgataaaacgggtactgtaactgaggggcgccctgtggtgaccggctggttgcatgatgccggatggcagaacgagcataagggaattctgtatgctgctgaattgaaatcggaacatccgttggctttggctattgtcgaggctttgaaaaaggaaggtgagaagccggcaatcattgattcttttgagagccggacaggacgggggattgtggtgacccgtggaaataaaactttttgggcaggaagccatcggttactgaaagattttggagcgggaatttccgacttgttgaaagggatggtggaggattatgagaagagtggcaagagtttggtctattttggcgagggaaatacattgctggcggttatcgctattagtgataaaataaaagatacttccagacaagcggtcaaacaattgaaggagagtggaaagtatattgtattgttgaccggtgacggtcatcttactgcacagaatgtggccggagaaattgatgcgaatcgttttatttcggatgctttgccggccgataaggagaatgttattaaagagttacaggctgaaggaagagtcgtagctatggtaggcgatggcattaatgactcgcaggcgttggcccgtgccaatgtaagtattgcgatgggtaaaggtacagatattgccatggatgtagcgatggttacgttaatgacttcggatttgttgttgttacccaaagcttttaagctttcctataaaactgtacggttgatccatcagaatcttttttgggcatttatctataatttgataggcattccagtggcggcaggtattctgttcccactatatggtattttgcttaacccgatgattgccagtgctgccatggcatgtagttctgtcagtgtagtgttgaacagcttgagtctgaattggagaaagttgtgattgaattaaaaataaataaaaaagcagccgtgcggagattttgttttgcatggctgcttttcatttttccattttttagtttataatttaaaaaggattgtttctccctctttgtacttctattcgtattccgaagttcccattttctgatttcatttcgaaagctccattgaaattatttctttcccaaggcaatgcgcttggatttcgtactttgttcccgtcagcgtcatattcaccgtatgtggttatgtgtaatccgtttttcaatttaaaggttgcactttgtaaggtaggaggcattgacattgttccgaatccatagattcccattcccggatacatgggggtaaatacatggttgtaagaccctctgtcataaatgatattcatattgggacggaatatttcattgtaattcgcaattgtattattgttgtaaggctgataataaagttgcggggctatcagagggggaggggccacaatcatggaacccatatccagcataaatccgttaaaattcttgtaaccatccaatgaaatgggcggaatactatctgttaccacttcggactgcgcaaaggtagtagcggcaatcagaaacatagaaatggatagaaccagctttttcatatactgttattttttttgttccggacaaatatagggatattttctaaattctgtatcgtttctgtttcctgtgaatagatcttttcaaatactttatgaagttcttcctcatcggctatcagttgtcgtaattcttgcagatgtacagcattggctgattgaggtatccataatcttaaataaccaccttcagcatacttttctttcagatgtgccagaaaacgtatgtattgtttttctttgtctagctcgggatagttggaaagaccatattgtaccgtccgtctcaaggtaatgtccggatcaataatacggtcggcctccgctacaattttgccataaatgctacgagggacatgcttgttggatgcacggtgatcttctactgcctctttcataatcaaaatatgctcttcagggaaccatttccttaatttcttgtccgcccatagtattttccctgaaatgagatgatggaactctcgtccctcacagagtcccagatcatggtaggaggcaataacatacaccatcatgcggtttacgtcataatattgagacaatttgaggctttctgctataactttcaatacatgatctacacgatgtgctttgtcaaaatcagcgtattgtgggataattttacttgcgatatagttgcggaactccattggaaaatcattgatgtacgacaacatattctttcttttgattggggttgcaaatatacaataattatcccacctttgcagaaaaaagtaatatgtatcaaattattcaacctacacccgatgactttgatgaattgacctgtttatgggaagcttcggtgcgtgctactcatcatttcatacctgaagcatatattcagaagttaaaaccactggtatggagtgtttatcttcatagtatgccgctttacatgattcgtgacaatgctggtatagaaggattcatgggcattaatggaactatgcttgaaatgctctttgttcacccgcgtgccataggtacgggaataggaaaacaattgatgcgttatgctttggaacattgccatgtacgttatgtcgatgtaaacgaacagaataagaaagcgtccggcttttatagccattttggatttcgggttattggcagggatgcaaaagacgcatcgggcgaaccctatcctattttacatttaaaactgggaggtatcatgaaaattgaaaattggggattagttccctactctgaggcttgggagcggcagacggaattatttaatgccgtggtggaagctaaacaagtgggaaaaacgtatgaaaatagaattatctttgtagaacattcgcatgtctatacattaggcaagagtggaaaggagacgaatatgttgttgggggaggcgcaattgaaaatgattggtgccaccctttatcatattgatcgaggaggggatattacttatcatggtcccggacaattggtttgttatcctatcttgaatttggaggattatcatttggggttgaaggaatatattcatgtgttggaagaagcggtgatcagggtctgcgcatcttatggcatcgaggctgggcgagtgaagggagcaaccggagtatggctggcaacgggaactccgcaggaacggaaaatctgtgcaataggagtgagaagcagtcattttgtgacaatgcatggattggcgctgaatgtaaatacggatttgcgttatttcagttatatccatccttgtggattcatggataaaggggttacttcattacagaaagaattggggtgtgaagtgcctatggaagaagtggcaggacgtgtgcagaacgaattatctgaacttttgtaaataggatatgtaaataataccgtatgtgtacccttatacatacggggtgtgagtgtatcaaaagtccgatcgtgctatcatgtcgtcagctgtaggggcagggtttgtctgcccaaatgcataagcaaaccattttagggtgagcgaacctagctcctactagcaaaatgatacgccattttacttttgatacatccttgatttattcttttatatcttggtacaagaagcgcttgatacttttcttggctgttttttcaaattcctcaggatatagcttgaagcgggctatttgggaaaatgccggtaattgtttgttcagttcaaggcgattttcttccattactcgtacaaggtctgattggttcaagccgtgagcaaaagcatcatcggaatccggatagattaggcccaccagtttatcttgttgcagaataatcagtgactctgatacgtatggcatattgtttagcttggactctatttcttccggataaatgttttgtccggaagaagtgagtaacaggtttttgcaacgtcctttgatgaaaacatttccgtcttcatctattgtcgccatatcacctgtatgcaaccatccttcagtgtcaatgacttgccgtgtcgcttcctcgttcttataatagcccaacatcaggttggctccacggcataccagttcacccgcaatggctgatgggttgggagacagtactttggcttccatacgtgcggcaacttttccgcaagatgccaatttcagttctgtccaatgactatggcagatgatgggaccacattcagtcattccgtatgcaatggtgtatgggaaatctatcatttttagaaaggcttctacttcggcattgaaaggagcacctccgatgatgatttcgatgaaatttccgccgaaaacctccatcgccttctgcttgataagttcttttatcttatcactgatgatgggaacatgtaatagcagtttacctaatttgttgtctactttgggaagaatatttttcttgaatattttttccacaatcagtggtacgcaggctataacgcgcgggcggatttccgcaaatgattcggctatgattttgggtgatggcatacgggtaagaaaccatagatgggcgcctgctgtgaaaccgtaaagaaaatcgaaagtcatgccgaatacgtgccccaaaggtaacatggatacgacgctgtcacctgctttcagacctattttttctttacagtagagtacgttggagagtatgctgcgatagggcagcatcacgcctttggaatatccggtagtacctgaagtgtaattaatgatggctaggtcttctgatttttctttttcataagaaatatcatcaggacggaatcggcaggggaatttgtgtccgaatatctcattcagatggtcgcgggcataagctagtttttccgaacgggatacgggtacgccaaaatctttcaattctatgataccttccaaatgaggcatagctgcttcattcaagttctcccatatctgatcgcctacgaacaacaggcgggattcagagtggtttacaatattgtgtacctggtcggctttgaattcatgtagaataggtacaactacggcaccataggtgatgacggcaaggtaagttactgtccaatgagcgctattacgcccgcaaatggctattttatctcccttttcaatgccggcattttccagcaagatatgtattttctctattttacgggccacatctctgtattgcaatgtgatgcctttatagtctgtaagagcgtttaaataccaatttgtttttatactttgctcgataagagcaataaaactctgttctagttccatgataacttttgcacatttataggctgagtgtgcgcaaaagtagtaaaatgaggtaagggggatgggaaatgaaacagttttttacattaatttaacgtcctgaaaatgtagatcctttcatccctttactttaaaatgctagtttataatcgtttgccaattgttgacgtgtcctatgaaggagtatagttgctataattgccagaataagagtttaccttgcccgataccatgatatactctttgtttcaatgatagtcgggcaagttcgaaaattgtttctataattatgggatttctcgataaagaagctttatttatcgttgcttttattttctgtctcttctttagaaggctgtggtttgatgataagtcgcagggatgggtcgtaggtgaaataactccacatccaatctataaaaataaataaacggttttttacccccactatgctcatcaagtgtataaatagccatactgcccatgcgggaaatccactgaaacgtatcttttgcaattctaccactgcattatttctcccgatggttgccatagaccctttattataatatttaaaagggatgagcggctggcccttttcgatatttctcagattctttattaagttcatggcttgctgtatggcaggctgtacaacttgcggatgtcctttaggatactcttctgaaatcattagtgcggtgtcacctatagcaaatatatttttaaagtcttgtatctgattgtgttcattcactctcaaacggttgcctggaccatagcattcggcaggaaggcctgctagactgtttgcttttacgcctgctacccagtaaacgttggctgattctataaaattcccgtcatccagtactaacatattattctcgtaattttttacttgttggttcaataatatttctactcccaaatgagtgaggtatttttttacttcttcggaagattggggggagaaggcggaaagcaagcgtggaccaccatctattaatatgattctcatcgtactggtgtctagatcgggataatcgtgcggaaggatgaatttacgcatttcggctagtgcccctgccagttcaataccagttgctcctgcgccgactataatgaaggtcatcagttgctcccgctttttggagtcattagtgttcaatgctttttcaaagctttcaagtacttggttacgattatgcaaggcttctgctgtggtcttgagggacatggtgcgtttagctatttcgttgttgccgaaataattggtatagcatccggtagatataatcagatagtcgtagcttagactgccgatggaagtggtgacttgttgttcttcaggatgtacttgttgtacttcacatatgcggatatgaaagtctttgtatcctttgaatatcttgcggaatgggaatgaaatagcactgggttcgatgcctgatgtggctacttggtaaagtaacggctggaaaagatggtagttgtttttatccaataacacaacttggtagtgttgtcttttcagtttgcgtgcaatctttaacccgccaaatcctcctccgacaatgactattctttttttatttcctttgtcgggaatgttggttatctgttcagtcataatggtatttgttattttatgtatataataacaaataaccggggtgaaatgtttagtgtcatagctattagaaattaaaaattccgggggataatgtaggattgatataacttacgtctcgtgtttgcactagcctgccattcagagtgtagaataattgtttggtggccgacgaattgtttaggttaacagtaattacgtacagagtggttcgtttaggaaattctatgagatttacattggtggcagtccacatggcgtatggactcaatgtaaaatcattatatacattaggtgccagttgatctgtagtttgtaaattggtattagtcatcacccattgggcattaccgttcatccatacttttttttcaaaaccattttgagtaaaagaggctacataataattcccttgttggctccaacttacgttcatggcatgcggatatatctttttcagtgctatatgaaatgtagtgggagaggtagcagacaaggtggtgatcagtacccataatatcacacatatagaatagtatcttttcttcatggtcatttaaatgttttgatgaggttgataaaacagcttggttatactttttgttcgctggtataaaatctgattttgtggactttttccacacttttgtagtgttgtcaacaggtatctacacttctaaaaatggatatgtaaatatgtatatgcttgatttttaatgaagtattgagaaacgcagatttatggcacgtttcttgttttattgctatcggtaaaaatgaataaaaaacaaagtaattatgaaaaaggtattagtaacattggtattagtaatgactttaggcgtgtctgtttcttttgctcaagcggctccggtagaggttccggtagtggaaaagcctcaacaatctaagaaattggttttttcagaaatctatatgaatgatttgccggaagctgtgatggacaggcttgcactggaaggtgctatgataaagcaggcttttatgacctatggcattgatggaagccgtatttataaaattaatgtgttaacaagtgatgctcatgaacagacattgttcttaggtgaagatggtaaaattttgaaatagttagtatatttataatagtgcttttacatgaattcccggcttgtgataagtcgggattttttttagttaaattgtttcttgacgatattcgaaaaataattaagaaatctcttgtacataataattgtagattttatctttgccactcgaatttaaaaaagatgataccatggaaacttatgatatatattttaaagaaggtactgattttgctaataaaggattttcattgaaggataaggctaaggctattagaatggctgaagatatgttggctgaacgcaaaggatatgtgaaggattttgttggaggaactatttccgtaatgtgtaaagaaacgaaagaggaagtttggtccaagccgatagaggaggtttaagacaacttttacacctctttttgcctagtcaatcacagagttgtcaaatacaacccttgattatatttatggtgagttcgttattggcggacataaatatttctttctcttctaggaatttccggtatatttctcccttcatgctttttgccgggctgatatggataatgtcaggtttcatccgattgagcgatgattcttttttataagatgcttcagtataatttttctttccattctgtacatttttgacatatagttgttattcattagctgaatacatcgtaaactcaccaatgaagtcttctgtataaacagaggttagttacataaatttatagtgattttttgtctataatatatttgccattgaagtcttgttagattcctttggttcttctctgtttccggtgattgagtagcagatccattgaatgtttttccctttgtcctttgtgtaatatggaaaacataaaaggaaaaagaatttatgttgtttgaacaattaagttagaacgtgtgtttatgtaactattgtgattattgttgtgccgatggtgtacaggcattgatacaacaatgatttttcataaaaactttaaatttataaatttaggtagccctgacttgtgataagtcggggctatttgcttattatgtgctattaaacttggtcaactattggttaacaattttacgcaacagtaactctttgatgcaaaagtgataaataaaattttttgttcacatgaaaaaaactttctcaaaagctttgtagtattgattttctatgtatctttgcattgtgaagttacgaaaagagtgtaatttattggaaatgagcgtaggttaattgctcttgatagtaataggttacgatttagttagttatctactgcattatccttctgcgcgttgcgtaaccttcaaagaactcttcgtatgcaaaagtagctatttaattcgagattttgatataaactcccgttttttatcccctcattcataagaattttccgtaaaagcggtattgtccgtcggcacaccattgcccaaaacgagtttggaacaaacgtgtgccgactaccgcatagctggagaaaagggcattgcctcacgcctaaacgatgtttagacagatgaagcaatgcccctttcttttgcgcctatgccaagaggtgcttttacgggttttcaaatgatttttcttttttcgctgtctcttttgccggaagcggaaagtgaatgcagagtgtgtcagcctgccccatgaatgaaacaggcgcccacacacagccggacaaaccgggaagaatgattgttgccacccggctgaacaagttccgtcggatcggaaacaatcatacttcctttgttgtggtttgcccttttcacgcttccggtgatgtctttttccttttggtgattcttttttttacggattttcccctgaagtttttttctacacaatctgcctctgttttcgtttacctccattttgcgcctttcagtaagccgcatcagtcagtcattttcgttctgggcgcaaaggtaattccgggattggacgggaaagcaaggtcaagcctcctgttttcggtaaaaatctccagccctgcgggtagtattttgaccgaaaaaccttgcattccctaatccctaccttttcaagcacccgaaacgaaaacgaccgatgcgacagaaagacgcataaaaaaaatgtcggataaacgagaggcagataagatagtttgaaactcaactccctcagctcttgaatccgcattaaaaacaaaaaaatcaaaaacagcgaagatatgacggcaacggcaaatttcagacaaatggcgcaacacatcgggttggcgatatgcggcttgatgatgcgcaccgccttcggggtgttcggcatcctttggggcatcatcagagagattgtaaacggagtgttccgagtggcgataggtgtaatcgtggctatcctttccaccattgccttctttggcttcatcctttggttattcaccctttaacccttaccgacatggcaaaaagaaacagcaagacggcagcgcagcagtgcagatattacgaggtggacaacatcttcgtgtatatggtggaaacgtacatcaacggcaattttgaaactttccgaagattgtaccacgaactgaacaaggacgcacggagggatttcatggacttccttctcagcgaggtagagccgacctattggagagagatactgaaacagataatctaaaaatgacagcgatatgaaaggaacagaccatttcaagagaacgatatatatgtacttggaacagcgtgcggaggaagatgcgctatttgcaaagaagtaccgcaaccctgccaagaacatggacgagtgcgtgacccacattctgaactatgtgcagaaaagcggttgcaacggtttcacggacggagagatattcgggcaagccatccactactatgaggaaaacgagatagaggtgggcaaaccgatggactgccaagtggttgtgaaccacgttgtgaaactcacggcagaggaaaaggcggaggcacgtcagaacgctgtccgcaaataccaagaggaggaactccgcaagttgcagaaccgccacagaccgtcagcgagaaaagaaaaccaaccccaaccctcattatttgatttaggcttatgaaaccgaagaccaagatacagaaagaggtggcaagactttccgccaaccttcgccccatatcagcgacacaaatagattgggcataccgccactgcgttgagcatatcggctaccgcaccaagaaagggaacatcacctgttccgactgcggtcacgagtggcacagcgacagcggactatgcgacacccttgaaggctgcacctgccccaaatgccatgccgaactcaaagtgcaggacacacgcagacgcatctacaaggaaacgcagaatttcagcgtgataaccacctgcaaagggtatcaggtaatccgcgtggcgcaggtcagatgcgagagcaggaaaggcgaaccgatgcgtttctactgccacgaggtcgtgcagcgttggatttcacccgacggcaaggttacggacatggcgttgctccgtggcttccttttctgctattgcgatgtgtgggcattaggcagcgatatggaggtaagaccgcacaacagcctatacgatgatgtggtggcaagaagctgtgcatatccaaagatgaggatattgccccaactcagacgtaacggcttcaagggcgatttccacggcatctcccccgtgcgtcttttcaaagccttgctttcagacccaagaattgaaacccttatgaaaggcggtgagattgaggtcatgaaacactttcttttcaatacccgtactgccgatgaatgttgggcatcatatctgattgccaagcgtcacaagtatcagatagacaacctctcaatgtggtgcgactatctgcgtatgctcaaaaaactcggtcaagacctccgtaacccgaagaacatctgtcccgaagatttcatggcggcacacgacaacgcaacccgaaaaattgaagccatacacgagaaggaaagagccgcagagcaacgccgttgggagattgaaaggcgtgagcgtgagcaacagcgacaactccaacgaaagaaagatgcggaggatttcatcgccaacaaatccaaattcttcggcttggtaatcacggacgaggaaataatcgtcaaggtgcttgaaagcatagacgagtattacaacgagggcaagacgcagggcatctgcgtgtttggcagtggatactacaagaaagccgacaccctcatactatcggcaaggattggcgatgagattattgaaaccgtagaggtggacttgcgaaccctcgaagtggtgcagtgccacggcaagcacaaccaggacaccgaatatcacgagcgcatcatagaccttgtgaacaagaacgccaaccttatccgtgagcggatgaaagcggcatagcataacccctaaaacaacattgatatggaagtaagaattgaaagtatgatttgtgtgtgggatgatgcaatccccacgatgttccttgaatttgtgaacctcctcactctcacaacgagtgagggggaattgagaaagagcgtaaaggagtttgccgagaagcacgaacttgacaagtttttcctttacggcttcggctcacaccatttctacctgcaccaacgctacacaagcaaccccgaaatggtgatgaagaacagagttctgtcagtacatttttaaccatctaaaaagcaacattatgacaacacgaatgaccatcaacggagtaagcacctgcgcggaagcaggtacggagaaatacgagcgtttccaatcgggtatcggaagacgcaggcggacacttgtgcagtacgactaccgccaccccatagacagagaattgttctcttgtgtcaaacccacgttggacgagtgccgagccgcacgggacaagtggctgaacgcaaagaagggaaaggaggacagactatgaacacgacctatcaaacgctgatagtcaagttcagcgaacctatcacggcattggacggtatctttgacgataccggagcgtggggaacggacaccctcaaggggtggatagatgattacgaaagcacacgtttcaccgccaccgacagccatacggcagtcatcacgagcgagtacaatatggaatgtgtgaaagagtggctacaacggcagacccccatttccgaaatgcgagaattttgaacgggatggcggtgtccgcaccgccaatacttaaaaccctaaaaacaaaagatatgatagccaagacgatattacagcagataggcggaaaacgcttcaccgccatgacaggtagccgtgatttcatagatatgggcaacggcttacggatgagccttgcaaggaacaaaacaagtgccaaccgccttgacatcatctatgacgaaggggcagacctctacaatatgcgcttctaccgcaggacgttcagcaaaaagacctttgagtgcaagacaaaggacattgccgtacacgagggtatctattttgatatgctggaggaaatgttcacgatggtgacgggactttacacacgcttttgagtggcggggcggcgagagccgccctactttctttcagtgagcatgatggcggacaaagaaagtagcaaagaaacctttgtccaatctgcgataactaaaaaatccgcaagtaaaacttgcggaggctatatattgggtcgttattttttggtggaggggaatgataatctcgaaccgttgaactacacatttctgcttcgtctccatttcccccaacgatttgatacgttcaatcatttttgttgttcctttctgaattttcctaaatactttcttcataatttcgctatactttttatggttaataactatgttttgtattgctctcacaacacttacaacttgaagtgttatttggaaaccgataggcaaaaatggctcaacgatgtcaattaacgagaaaatcctacgataatctatcaagtgatagagcaaaagacgtgccaagttaaatatggcacgtcttttgccagttttgtcagtccttttatgggatatacaacagcgcaaactccgcctttctccgtttgagcagcatggcgtggcgttttcctttgtagttgcagaaggctatatactcacggtagatgttcctgtcaccagcttccagcttcttgattaaggtgcttttggggattgttttgctgcctaacagcttcgccggtcccacattgtaagctaacgtgccaagcaaaatcgaatcaaccccgaatttacggaacatggcgacaaatttgcgcaggtctttccgcaaaagttcatccgcatcccgttttgtcatggttcgtgccgaatacttctcgtttggcaaaagtttgtgaccccaaccgacgtatgggtagtgtttttctgagtgccagccttcaaagtagcggcagcataaaaaagcacgttccataagcggcagtcggtagattgccgcctgcccgtccgttccctcttggcggctgatctgcgcggacacagaacagaccgtcagaagtgaacagagcattgtcatgaatacacgcatcatttcaacaaggggctgaagttgccgatgggaacgatggtaagatcgtcgtcctttacattcctgttgttgaagtcaaattccagttcgtaggagttgctaaagttatcctccaccaccacgatgaaattatgcgcctcatcacccgccgccgtgtagtacaggcggaatttttcgttctccagcaggtagcggtcgttaggcaggaaggtgatgccgttatccattttgagcgagccttccccctcgaactggaaatagcggatggtatagagcgtacccgaaaagtcgccctcctttttcagttcacagcggatttccactgtctgcccctttactaccttgttcggcacgggcatgacctccaccgtgaagggataggactgctggatgtccatgtcatcgtcacatgacacgagggtgaatgacatggcggctatcaggcataacgccactgccttgaatattgatgttctcttgtttctgttgttcagtatgttcattgttcttcgatttttagatggttgtttttctgttttttcgttgtcagttgcaggtactcgttcaagtccttgcaaccgtcatagagggaggaacggtcggtgacacgttccccgtatcgcatggtaagtgcggcaagcgtccgccgtccggcttcgtcacggtcgaggaagcagccgatgcgcccgtatccgtccagcaatcccgccgccttctccacgttggcgactgagttcagcacaagacagtcagcgttaccggttacaccaagcgtcacggcagagagaaagtccatgaagccctcgaacacgaggcactcgtcagccgggatgtcattcgcctttaccagtgatacagacttcggaggtatgcaacccttgaaatatcggcttctgacttcatagccacctgccatgttcggaaagccaacggcaaaataccgtttcccacgcacaccgtagttcaagcggcagcagtgacgggatgcgatggcgtaagggatgccccgttcctctaaatactccgtcagcagtgagcggagcagcggagcgacctccacatcctcaaaaacggattcggtcggcttcgagagatagacgggcttttcccatccggcaaccgtcatattggcggcttccgctatgaacttcgcttgcttcatgaagtcatcgctttgcagaaactccccggcaagcgtgaagatgtcgccgcccttgcccaaaccgaagtcgtaccagagctgtttcgccacgttcacacggaaagaggatgtgcgctcgcccctgtacggggcaagataccacagctcgttaccgctccttctgacaggctcatgccccagccgtgcgagaaaatccgcaagcggcatccttctgacagcatctatttccgtcctttccatgcccgtgtcagttgatgatgaacttgataccgaccccgaactgcgtgtggaacttccgtgtgtcgccaccccaaaggcaacgctcccgcaggttggcaagcagggcgatacggtctgccacgtaacactccacatcgagcgtcagcgcaccgccgtagatgaaggcgtcccggtcgtgcagcgtggagccgtcatgcagcaccttcttcccccaatttaccgcctcatatccggcgagagccgaagccccggcatagacgaaaacaatctttcgggcgtccgacagtatcttgaagtaatagccgccctccgccgtgaactgcgccacgggtatcttggtgtccttgtagggattgttcttcaacaggtattcgccaccgaacacccacttgttccccttcttcgtgtaggtggagagagccgccccgaagctgtacccgccgtccttgccgccgagattgaagccgtccgccatgtccgccctcacctcgatgccctgcatcttcggcagacaccgctgggcgtgcgcctgccctgtaaaaagggcaagcgacgcgatgattattgcgatgtactttctcatggtcagcgtacttgaagttcgttgatggtacccgcgcgtaccaaatcctcgttctcaatcacgaaggactggtgacggccgccgttcttctcgttcaattccaccacgaggcacttgtcatcggggatggtgaacttcgccatcgtgaagaccgtgcgctcgctctttttgcccggcacgagggtggcgtagttctgcgcgcggagcggcagaataatctgctcctgcacggcagtacgcttcgcaaccttcttgtccacgattttccaagtgatgtagtccacatcgaaaggcacgttgctctggttctttatctccgtgtggaaataaagcaagccgttgtgcgtgtagatgcctttcaacaggtattggatgccgaaacgcttgcagccgatatgcttcacctcgcgcttgttctgtttgtggatggacttcatgataaggcgcaccagcatcgggctttcgctgcccagctctttcagatagatttcctgcgcgttgttcgggcggttcaccgtgctgccgtcatggatgaagtcgcacatctccacgttgagcaacagcggttcggcggcgtacttcacgttgaaggtgtagaaactgccgtcctccgtgatgacggacatattcgtttcgttgggaaaattccttacggtagccttcacacggatgatgttctccgctccgtcggctttcccggcaatcaggtcgggcgagcctaaatcgacatagcgcacctccgccggaaaaatgacgtggacggtcttgtcgtaggtcacttccagaccgtgcggcggtatcatgcggtcgaaggtcagcttgcgtgacagcccgtgatataggtcgccgtccgcctccttctgcggatagacctccttcgtcaaggtcggttgttcacttccgttggtcgtttcaacggttacattctcctgcgcgttggcagttatgatgcccatagcgagggcaaacatgatgattacttttctcattacttttggattttagtggtaatttttattgttttcaatatttttcttggtaaagcatgaccctgtacccggctttcagatgcaccttgacggttcgcatctttttggcgatgtactggctcgtgccttgtatcagccccttgcccaagtcggaggcgagctgcgccccggcattggtggagatgttgatgctgcttcccagcgagccgcccatgttggcggcgacctcccggacggcgttcatctccatcgagttcgggatgaagatgccgggctgtccgtccgtgtcatagaccgcaagctccacggggataatcgtgccgtcgtattccagcgaggtaatctcgatgtcgagccgctcaccctgtatcttgcccgtgccgaccaccaccgcaccccggggtattgtcctgcctgccaccgccataggctccagcaggcgcagccttaccgtctgcccgtccgtcacgctctgcgccccatgcacgcacgccggtatggtgttcctgtccaatacctccgccgtgccgacagccgtgttgaaaccccggttgcgttcctgcgataaggcggcgacaaactccgcgttactcataggctgtgagagtgaagaaactacttgatgctccacctgtctgataggcattgccttgttcttcttccctttctgcacggtagttggctctgccctctgttccgccgatggctgtcctccgttctgaccgcccatgtactttgccgccagctcgtaggacttctccataagagccacctgctcgtccatagaggaagccttgcccctctcgctttccagttccgactccagcgaggcgatgcgctccaacagctcatccatctcggcattgtcgttcttcggctgttcgtagaagttgccgagggtggcgttcaggtcacggtaggcggcagcggaggattggatagtctgcggtgtggcaggctgtgccttttcctccttgccgcccggattggcgaggtcgaagtccgtcccgtcctccgttccagctatctcgcggtcgaacatgtcgcccagctgcccgatggcacggttgcggctctccagacgctcctccatctccccatgctcgtaggctttcagtttgtcgccgataatctgcttgttcgccttgtcagcgtcgggcatctcggtgttgtatccgtccgttcccggcggttgctccttgccggaggacggggcgaatatcagccacatcgccccgatgaacaccaacaccatagcgggcagcacgatcatcttctgccgtttcagccgttgcgcctctgtcagcggttcgcgctcctttttcggtttccccgtttcgggagcagctttgttctctttcgtcggttcattctttgtctgttccatataaataaggtgttaagtgattgcctgtttccgccggggtcggcagttccacccgtccggcgtgtcccgtttccatatgtgagccgtcgttcctgccgatgtcatagacggctctgccgaaggtgtaaagggcaagcaccgcgaaggcggcgaacatccccagcacgatgcggcggcgtgtttccggcggcaagccgtccagataccctttgagacttgccgccaagcgtttccgtttgtcgtggagtttccaatacatgccccacattgattttctgatacttttcatgtcctgttaccgtttgatagtctgtaaatccttgttctcaatgatggtgaaaccctcgatggtaaaaccgttcgggttgtcatccgaccgcgatgcgttcagcaggcggcaggtggtcacgaggctgcgctcggtgacgttgctctgccggatgattttctgtgtggcgtaggtcacggcacggtagggataggcgttgaagtcgcacaccacgctgtccaccttcagcacttggttgatgttcccggcgatgatgcggttgtagtaccccttctccgcgaagtccgaataatagtggtacacgctcttgtccgccagcagcaaggcacgtttcacgttgtgttcaatcgcgcttttttcaggtgatagcgtgaagaacatctcgtggaaacggcgcacatgttcccgtgcctccgccgggcggttctgcgacaaatcctgagacaaggcgagcatcaggctcttgccgttgtccagcacatagattttctcccgttgcttctctgcgaaacggtaggagttccacacgctccacaccgtcaccacggcgcacagcgagaggaagacgataccgaacaggcgtatctgcctgaacgacgattcgatgtttctaagtgatttgaattccatttatattttccaatttatgattgcacattgattatttcagcaatttgccgacacgtccgactgcgtttcctgcggctgcacccgccacgctgcccgccatgcttccggctcgtcccgccatctggttcacgttgcgaccgtaaccgcccatgcctccggcttggataatccagcccgcaacggtgggaatggtaaagtagccgatgatgccgatgcagaggaatacgatatacaccccgtcgctcgaatccagcgagaagttcgggtctgcctgcatccgctcgatgtcgttttgcagcatcagaacctgtatcttcgccagtatggtgctgaacatgtccgataccggtagccacagatagacctgtatatagcggcatatccactgcgtgagcgtgttttggaaaccgtcccataccgacagggcgaaggctatcggaccgagaatcgccagcaccacgagaaagaaggtgcggacggtgtctatcacgagggcggcggcttggaacagcagttcgagtatctcgcggaagaagtcgcggatgctcttcttcatgttgtacattccccggtcgatatacattcccgccatcgtcaccatgtcggagggcgaccagccgagttcctccagttgcttgtcaaattcctcgttggacacgaggtaggcggtttcggggttgcgtaccatcgcctcgtattccagtttgtccttctgctcccggtatcggttcatgtccagcgtttccgcctccagcatctttgccgtgccctgtacgacgggtgagaggatgctgtttatcgtgcccagcaccacagtcgggaagaacatgatgcacagaccgatggcaaaaggacggagcatcgggaatacgtctatcggttcagctctcgccagcgactgccatacccggtaggcgacgtagaacagcgcacccagcccggcgatgcctttcgccacaccagccatgtccccacacagcggcatcatctgctcataaagtgaacgtaaaatctgatgaaggttgtcgaacttcataggctaccagtatctttcgttcatgttcccgtacagccccatgatgcggtcgaggtcgttcttctttttcgcacgcaggtaactcacggagatgttcttgttcgtgtagtagctcacgaggttgcggtaacgcttcatcttcgagtggcagcgttccaccacgtccatgcgctccttgtcggtcatggagagcgtggtgatgttcaccacgttcctgagttccgtcaacacttcgttgctttcctccagcagtttcgtgtagccgaaagcgattgcggaaagctcttcgggtctgaaattcccgtcacggagcatccgttggaaactgttcacatagatgtctgtgatgtcgcccaccatcaggatggtctgctgcaccttgcgggcgtccttgaccagattgttcaccgatttgagggcatcgtaatacttcttgccctgctgatagattttcaccgtctcctgaaagttgctcaccatgttcgtggcggtcttggaggtatggatgatgtttttggaggcattgatgatgccctgcgctagattgcccggatcgcttacgacccactgtgcgcttgccctgcccgcgaaaagcaggcacaggcagataatcattgttattcttgttctcatgttactttggattttagtggttgttattcttcggtcggatgtcccggctgcggcttcacccgcacatagtccccgtttggcgagaaagtcagcacgtccgtggcctcgttgtaggacacgtcgatgcggaagccggtgttcatgaacaggttgccgttctcctcctgcaagagataggtttccggcttgagcttgcggcgcagaccgctacgacggaacaccgtcactttgtaggcttcgccctccttgtagataagcacgtcaggttttccctccacgctctcccagttcccgcacagcatgtcgcggcggttgtcggccacgtcgcaggattgcagcatcatgaccgccaatccgataaggcacttgctgacttgcagcattttcacttttggtaaattcatacgcgtttttcttttttggttgatacattctgttttttagttattccttgtttctccgcctttcggcaagctgccggatggcggcttcgatgtcgtcgcccagcttctccgccagacggtaaacctccactttttccgtttcctcggtggtgtacgccagatactcttccgcgctgacctccgtggcatagaccgccgactgcgtgccgcccaagcctatccacacctccttgtagagccgtgaagggttgttcgccatgttgatggagagtatctgcgacttctccttttccgtcagtccgagcaacgcctgtatctggtcgaacttgttcatatatttcctttggtcaagcaggattttacaatccgagttgttgataatgctctctttgaccaccggagaactgataatgtcgtccacctcctgcgtcaccacgattgcctcgccgtaatattttctgaccgtcttatacatatagcgcagatattcagccatgttcgccgatgagagggccttccaagcctcttccacgataagctgtttccgcacgcctttcagccgccgcatcttgttgatgaaggcttccatgatgatgatggtcacgacggggaacagttcgcggttttctttaatcgaatctatctcgaagacgatgaaccgcttgccgagcaggtcgatgttctccgtggagttgagcaggaaatcgtaacgcccgccccggtaatactgccgcatggtggtgagcatgttgtcgatgttgaagtcggacttctccaccttgatgtcacgctgtgccagttccttgcggtagtcgtcacgcatatactcgtagaaggtgttgaacgacggcacgatgctacggtcggattggatgcgctcaatataggcactcacggcactgcccagctcgccgctctccgtctttgtcaccttgtcgtcctccgacttccagagcgtcagcaacagggtcttgatgctgtccttcttctccacgtcgaagatgtaatcgtcggtgtagaacgggttgaagctgatgggcttatcttccgtgtaggtgaaatacacaccgtccgctccgcctgtcttgcgtcggatcatgccgcacaagccctgataggagtttcccgtgtccaccaataccacatgtgcgccttgctcataatattggcgcacgaggtggttcatgaagaaagacttgccgctgcccgaaggacccagcacgaacttgttgcggttggtcgtgatacctcgcttcatgggcaggtcggagatgtcaaggtgcagcggttttcccgtgagcctgtccaccatcttgatgccgaagggcgagagcgagctgcggtagttggtttcctctgtgaacaggcacaccgcctgttcgatgaaggtgtggaaactctcttccgccgggaagtccgccgcattgccgggtatcgccgcccagtagagtgtcgggcagtcgatggtgttgtggcgcggcacgcattccatgcttgccaactggctgcccacgtcgttcttgatatgcttcagttcctccgcatcgtcgctccacgccatgacgttgaagtgtgcccgtaccgaggtcagtccgtaggaatgggcttcgttcaggtattggtctatgtcgagtaggtcagcccccttacgggagctttcccctctaagaaccgtacgtgagagtttcccctcatacggctcaagcaattcaaaacttttatttgtaactaaaagccggctcatagtaacttccatttatttctgttagtaattcggctgcaatgatcatgtattaggactttcgcctttctactgctccctgtcatttcagtaattttccagggagtttcccgtgtgatgtgcttgccacacacagggcaacattgcatttgctgattccacaggcgatagatatattgcttgccgtctaagtgtgcaagcattcttcgggtcttgtattgatcgaagaaatctttccaatcggcatcatatgggttggcctcactgcggattttgatatgtcgctttattttcgtatccgacaatctcacaagagtgtggtatttatccactttcctgttttcaagcggtacggcaaaagtccagcttctacctcttacagtgtgataatacttgttggcaatccatcgtttaccttttttgggatgtcttctgcgagaccatcgccatagtttgttgaaaatttgtgcatctgttttacggaaagtttccgatgcagaacaccccttgtagtagttcgcccatcctctaatgactgggtttagcaatcgtatcaaagattgttgcttagaagacttgttcttgtccactatttcacgaaccttatctaaaaatctctttcgactcttcttggatggttttgtgataaacttgcctttatattttctgatattgaacccaagaaaatcaaacccttcttctatatgagttatcttagtcttttcttctgataaggtaagccctcttgcttgaagaaactcaatgactaatggtttaacatggttctccaacaactccttactctctcctgtgataataaaatcatccgcgtagcgaacaagatttatcataggagtatagtaatttttcttcgagcggtttatcggaaagctatcggcaagcagtttttccagtccgtccaaagtcatatttgcaagagttggggagatgatgccgccttgaggagttccctcctctgtcggaaaaagttgcttgttgaaaataaatccacttttcaaccatttacggagcaaaactttatccatagggatattgtcaagcaaccattcatgactgatatggtcgaaacaacctttgatatcaccttctaagatccattgtggggatgtcgtccttgccaggtcattgaagcattgttgaacggcatctgccgtgctcctttcttttctgaaaccataagaattggcatcagccgttgtttcagctacgggagccagtgccatcagatacaatgcctgcatagcccggtctttcatagttggtatacccaatggtcttaatttcccgttactctttctgatatgtactcgtctcagaggttggggtgtataacctctccttttcagttcggttattgcacacactttagcatctggcgttttccatgttaccatatcgacgccagccgttttactcccattattggaagttacacgtcttaccgctaatgctttagcgtaaaacgagtgggtcagtgtccactgcaaggctttgaccttgttgtggcgaccctctttttgagcctttacaatacgcgcttgtagcttttgaaccgcagcttcgcatttgagccaatttatactgtcccatttgctctgcgtttggtcagtcgatgcacacgattttttaatttcgttcatttgcttttctccttttaaaagttctaaaagtttcttgtaaagaatcacctaccgcagaagtcagcctgctttcgcagcgggatgatgtttcaatccctattcaccccattacagggtggcattcgctttttctgcaatcctatacccgcactccattcggcattccttacggtctgcttacctgtcattggcaggagaaatacgggcttactacgttccgtgcaagtaacttataagtgggttaggttctgtctattacaccggcagtactctgttcgtgtattcccagaatggagaggaataaccgactgcttcccttttgggctgaagcctatcagtatctttggcttcttcaaccttacgacgtttagacgacagttcgcttacgctaaccataccacccaagccaagctccctgactgtatgatactaacagccattgtctttccctcacggttctgactgctcctttcggaagggctaccttgtctggacagctttgatacagtatattactattggtgcatctgtccataggctaccgttgacgaaacaacgggttaaatctaagtttaacaattacttacacagcgacgtatcgcacccactcgcggttgatgctgttgctccttgaatagcgagatagcgactgcatgttacgggcggacttctcgaacttctgcaaggtttcctcactgttgtctatcagcacatactggttgtagatatggttgcaggagagcagaagccccaccggggaggcgaatgacagtcggcagtcactccggtcggtggagagcttctcgtaacgggtgtcggtagccaccttgcccggcaggtcttccgcgtcggagagggtgtgcagacacaggcggttgtcgccgatgcgcatctcccttgccgaaagctcgatgtcctgcaaggtggtgtcaccttccggcatgagcgagaagtagcgttcaataagtcccgtctttccctcagtacccacaatctcatcggtggagaggcggcgcagcctgacaagcccgctgtcgttcatgatgcgctcgaactgttcgcaggcttccaagaacttggtcgtggtttccctgtccagctccttcgggatgatatgtccccggcacagcgtgctgaaattgctctgcatccggttacgctcctttgttgtcttggtcaggtagaggtagcaggtgtgtttcaggtacggacgctcgttgaagtgacgctcgaaagagcggcttaaaaagctcatgtcgtccttctgaagctccggtttgtagcgttccttgatgaaccagtcctgtttgtggacgacggagtagtccggcagcaccttgatagccttgcaccagcaactgtgtatcgcctcgtactccgcacccgtcacggtgtaaagttccggtagttccacctcgaaagccaccgtgatgtcggcgtcctttgagatgatgcagccatgctccaccgctaaaagtgggaacctgttttccagtgttgtcattttcgatgtattcctcattgtctttcttcctttcgttgtcgtttgaacagacgggttatccgccgccggttgataaggtatcggggatggctccgtgccgctcctaatttcatcagcccgtgttcaccgtaccgggcgttcagcgcgaaggtctgccatacaaggagggaggacgatgccgcgccgaagccgatacatatccactggtcgataccgaccatgtagaggatgacgaacaggacgaagagagccagcagacctccgcagaagatgaagaggtactgtgccttcaagcccttgaactctaccggacggccgatacccttgttgattgggtattcagccatacattatttattaaaggaagaatgagcgcaggatggtggcggcaacaatcaggaagatgcacgcgccgaaccacgaggcggctgtcttgctggtgtcggggtcgcccgatgaaaacttgccgtacacttttacgcccccgataagcccgacgactgcaccgatggcgtatatcagtttagttccggggtcgaaataagaactcaccatagaggtggcttcgttgatgcccgcgatgccgtttccctgcgcgaaagcggaggcggttgcggcgatgacaagtgccgcggagaggattgcttttctgtttttcaagatgttcttgttcataaactgttcttgttttttgccgtcaaaagggtggatggtcctttgtcgggcggttgatactttgtttctttactttggttttagtggatgcccgtttgtttccacggacgtgggcgtgtccgttgcggatggggatgcgccttgcgtttcctcgccgcgtgggttgatgtcattctttcatgttcatttcttttattgttgtcatacatagttgcgaatgtcgaactcctcgatgttgtccggcacgacgaactccttttcagatttcttcagccgaatctcgataagccccttgatgcggatgcctatctccgaagagccttccatcattttctcgtacaactccgtgccctccatgtcggtgaacaccttagccgccttttcacgttccgcctgtgtcgcgtccgggtttttggcggtcttgcaggcgtcgtcaatctcgtcaaagctgctgcccgaagcccgtggcgtgtccgaggcgtcctcttccggttcgtcgtccccgtatcccagttcctccggcggtatgctcgtgaaggtctcatcgagtttttcctccgggacttgtgccgggcgggatgcgtttcccgtttttccgtcgtcaaaagtagcctcttcctccgacagctcaatgcctttttcaatagtggcggcttcttgcgtcggtatggcagcggttgtccgggtggatgccatcctgaaacggctcttgccgatgatgtccgccttttccgcagggacttcctcgtgtgccgctatgcgtttagcctcattcccgtccagtgaccgccataatccgacaatgcccttgaagaagcggacaatccgcgtgtccatgatgcgctcgtaaaggagcaggaacaggaaccagaggttgcagccgaccgataccgccagcagaatgtctgtcatgctgattgtgtaattcatatccttccgtttttggttagaatactgaattgtaatttcgggcataaaggctctttatcgcatcttcgcactggttgaagtggtgcgtcagcacatggtcgatgtaagcggacagcgtaagccggtcatgcccgattacacgggtgatacgcatgatacgctcgtggtactccgggcgcacatacgccatcttcccctcacgtgcctttacttccgggtcgcggatgaacaggcgttcatagtccttctcactgcatttgccgcttaccgggacaggcgacagtatttccacactcgcctgcacttgggtaaacatacctccgcagtcttgctgtggtcttttttcattcggtgtcatttctttttccattttcaaatcagatcttcacgttgtttcttgtacagttcgttgattctctccttgtgctgttccagatgctggcgcagcacggtatccacatatccgcctactgagatttcccctccggcgatgtcgttcacgattctgaggatcttgccgtggacgtcacggctgatatagacacattggcgggtctttatctcgttgcggcgcaggaatagctcgttgtagtcctcgtcctgccttttccggcgtccactttccctctgcgctttttcccgtgttacgggttgcacaggagatggttccggtgcggcggtgtcctcttcggtcggtgcagctgcgggtacttcctgtgcggggcgcagtgtcccgtcctgtgtgcgccgcccgatggaggctaacagcagttcctcgtcgatgccttccgtgttcactttcctgctgcccatgctcactgcggtctgatgatgtcgcttatctcttcggaaaactcccggatgccactccctttcagcagtgccgtgtccatcgggaagatggtggagcggaaaacgctcttgcgctcttccgaaaggtcacggcggaacttcttgctgtcgggcaagcgggtggaaagtaccggaaagcccatttcggctatcacttcctcgtagatgccgtacaagtcgttcctctccctgccgtccaccatcgtccagaacagatgcagcccctttgttttcgcctgtccggtagtcatcagcctgtcgcggaacatcgtgacgaatttcagggtactctccacgacaaagcggtcggcactcagcggagtgaaaatgtagtccatctgcgagagcgtctttatcacgccgttgcttcggagtgtgccgggcatgtcgaagaacaccacgtcgggtttcacgtcctcagtggcaatcatcctctcggcatcgtcgagggcgttcaccgcattgcttttgacgatggtgtaggcgttctttttgatccggcggaaatggtcgcaagcgagagccttgaagtaggtgctgctgtcgataagccccatttcgtgttcgcgcagcccgtggatgctgtgctgcgggtcgtcgcagtccacgacggcgacattgtagcctttcacgttgtgcaggtagctggcggcaagtgccgtgacagtggatttgccgatgccacctttctgtgttgcgaatgcaacgaagatttccttactcatagttccatttattttaattgttgatgatttgtttttctgtttccatacggatttggctgtcgcaccatccgcttccgtgactacacacgcaggcgggtcgtcgcgtatccggttctgtggtgaagcggtgcgtcggacaaatggtgattgacgacattgcgtcatgaagtcattgaatccatacgtcaccgaattgtcggagaaccgggtttccgacggttcgggtatccgtttcggcaagtatccgaagaagcggatttccgggtatttgaatgttccgtttatcatatcttcaaatcgttcgtttcttgaatcatgctgcaaataaacaagtatattttggaacctgtatcacttctccggcaagtggcggcacgttgcgccggttggcagtcattgaccgggtcaagcatctgtccgataccgctttaagggcgtaactttgcacccggacagcagggttcgccgatgacgcgcggcccggagtcctgaaaggtattttcccaatccgtcccctgacggatttttatgttcacctgaacatagcaagatgtcttttcagccgctcaaaatattttgagcagccacgaaaagcacttgcccttgcagggggcgggctttccctccgaagtcgggaagcctttcagaactgcggtgctgtaatccgaagcggcggcttatgccgtcaatccgctaaatccaaagtaatatgaaagagaaaaggaaaagcaaatcagggagaaatcccaaacttgatccggcggtgtaccggtacaccgtccgtttcaacgaggaggaacacaaccgtttcctcgccatgttcggaaaatcgggtgtctatgcacggtctgttttcctcaaagcgcacttcttcgggcaaccgttcaaggtgctgaaggtggacaagacgttggtggactattacaccaaactgtcggattttcatgcacaattccgtgccgtgggtacgaattacaaccaagtcgtgaaggaactgaggctgcatttttcagagaaaaaggcgatggcgttgctctacaaattagagcaacacaccgtcgaactcgtgaaactgagccgccggattgtggaactttcaagggaaatggaggcaaaatggtcgcaaaaatcagtgtaggaagttcgttgtacggcgcgattgcctacaacggggagaagattaacgaggcgcaggggcggcttctcaccaccaaccgcatctacaatgacggttcgggaacggtggacataggcaaggcgatggagggttttctcaccttcctgccaccgcagatgaagatcgagaagccggtggtgcatatctctctcaacccgcacccggaggatgtgctgaccgatattgagttgcagaatatcgcccgcgagtatctggaaaaactcggtttcggaaaccagccttatcttgtattcaagcacgaggacatcgaccgccaccacctgcacatcgtgacggtcaacgtggacgagaacgggaaaaggctcaaccgggattttctctaccgccgcagcgaccgtatccgcagggaactggaacagaagtacggattgcatccggcagaacgtaaaaatcagagattggataatccgttgcgcaaggtggccgcatcggcaggtgatgtgaagaagcaggtaggcaacaccgtgaaggctctgaatgggcagtaccgtttccagacgatgggcgaataccgtgcgctcctttccttatataatatgacggtggaggaagcgaggggcaacgtgcgcggacgggagtatcacgggctggtctattccgtcacggacgacaagggtaacaaggtgggcaacccgttcaaatcctcgcttttcgggaagtccgcaggctatgaagccgtacagaagaagtttgtccgttccaaatcggaaatcaaggataggaaactggcagacatgacgaaacgcaccgtcctttccgtgctgcaaggcacttatgacaaggacaaatttgtatcccaactcaaagagaagggcatcgacaccgtactgcgctacacagaggaagggcgcatctatggggctaccttcatcgaccaccgcacgggatgcgtgctgaacggttcgcgcatgggtaaggagctttcggcgaatgccttgcaggaacacttcaccctgccatacgccggacaaccgccgataccgctatccatccctgtggatgctgcggacaaggcacacgggcagaccgcctacgacagtgaagatatatcgggcggtatgggcttgctcactcccgaaggtccggcggtagatgccgaggaagaggctttcatccgggcgatgaagcgcaaaaagaagaaaaaacgcaagggcttgggtatgtaatcagagtatcaacaattaaaaaatcaatgtatgtcacaacaagaagacgatttgagggcattggcgaaaatcatggattttctgcgtgccgtgagtatcattttagtggtcatgaacgtgtactggttctgctacgaagccatccggctgtggggcgtgaacatcggcgtggtggacaaaatccttctgaacttcgaccgcacggcggggctgttccattccattctctacacgaagctgttttccgtccttttgcttgccttgtcctgtctgggtacgaagggtgtcaagggtgagaaaatcacttgggggagaatctggacagcatttgccgtcgggttcgtgctgtttttcctgaactggtggttgctgcccctgccgctgccgcttgaagcggtgacgggactgtatgtccttaccattggaacgggctatgtctgcctgttgatgggtggtctgtggatgagccgcctgttgaaacacaatttgatggaggatgttttcaacaacgagaacgagagtttcatgcaggaaacgaggcttatcgaaagcgagtattcggtcaatctgccgacacgtttctattacaggaaacgctggaacaacggttggatcaatgtagttaatcccttccgtgcgtccatcgtgttgggtacgccgggcagcggcaagtcctatgccgtggtaaacaattttatcaagcaacagattgaaaagggctttagtcaatacatctacgatttcaagtatcccgacctatctactattgcctacaaccatttgctgaaccacccggacggctacaaggtaaagccgaagttctatgtgatcaacttcgacgacccgcgacgctctcatcggtgcaatcccattcacccggattttatggaagatattacggatgcctatgagagtgcctacacaataatgctcaacctcaataaaacgtgggtgtgacctgaaaagtcacgtaattgattgttaaacagcaatgtatattgcaagatttaacccgctgttccgtcagcggtagcctactataaggtgcatctccagtgatgggttgtgccaagcttataggacaaagtacactttccgaaaggacaagactgaaccgtgagggaacgttaagggcggttagtatcataccgtcgagtggcgaggctggatagcatggttaacgtaagtgaactgactttagccgtcgtaaggtttgaaggagcgcaagatactttagctctcaccaaaaggtaagcagtcggataaccctcgcccatgttggggttacacggacacagcactgccggcggacttggcagaacctaaactatccgtttgtcaattgcgtggaacagggcaagcctgtatctctctcgtaataatgcgagtaagcgaaccgcaaggcaagccgaatggggtgcaggtatgagataacggagaaagcgaatgccgccctgtaatggggaggatacggattgaaccaacatcacgagttaatgagggtaacatcatccgacacgaaagtgggcagacttccgtatatggtaactctttacaagataacttttagaactttcaaaaggaggaaagcaaatgaacgagattaaaacatcgtgtgcgcctgctgacagcaggaatctgacttgggacggtatgaactggtccaagtgtgaaacctatgtccgaaagctacaagcgcgtattgtaaaggctcagaaagaaggcagacataacaaggtgaaaaccttgcagtggatgcttactcactctttttacgccaaggcattggcagtaaagagggttacttccaacaaagggaagaatacgtctggagtagataaacagctttgggactctcccaagcgcaagtacaaagcaatcggtgaacttagacgtcgtggctaccatccacagccgctccgtagggttcacatcaagaaaaagaacggtaaactccgaccgttgggaataccgaccatgaaagacagggcgatgcaagcattatatctcatggcattggaaccgatagccgaaacgacaggcgaccgtttttcttacggcttccgaaagaagcgcaggacaatggacgcaattcgtcagattgatacggttctaaatcgccagcattcccccgaatggattttggagggagatattaagggttgcttcgaccacatcagtcacgactggcttattgaaaatatccctatggataaaacaatactcagaaaatggctgaaatgtggagctgtattcaatggtaaactgttcccgacagaagagggtacaccacaaggaggtatcatatcaccgacacttgcaaatatggcacttgacggacttcaaccactcttggctgaaagattcaaaagacgtttcatcaactataagacattccactacaaagtgaatcttatcagatatgcggatgactttataatcacaggtcgagataaggaattattggaaaacgaggtcaaaccaatggtgatagaatttctcaaagaaaggggtcttaccttatccgaagagaaaactaccattacgaacatatacgatggatttgatttcttaggtttcaatgtaaggaagttcggcaaaaggctgtacacatccccgtccaaagatgcacagaaacgctttagggcaaaaatcagtgacatcgttaaaggtcataaaatgtgtaagcaggaatcgctgatacgaatgctcaatcctgtgataacaggttggggaaactattaccgatatggtgcatcaaccaatgcttttcacggttgcgacaatcacatttacaacctcacaaagaaatgggctttacgtcgccacccaaagaaacgcaagtcttgggttgcagataagtattggcatgaaattcgggggcgtaaatggacgtttgcatggaaatatgaaacaaaaagcaagaaagtgaactacctgacccttaaaaggttgtcggatatacattatactccgtacaagcaagtcaagggggaggcaaaccctttcgacccggaatatgatgattatttctttcagcgaaaggagcaacaaatgctggaatctctcaaaggacgtaagtcactcttatatttatggaacaagcagaagcggacttgtccgttatgcggcaaggagatagattgtacaaaagcatggaacgtcaatgaaatatctgttggtggttcaattgtacggcaacttgtccataacaactgctacaagcgaaataaacgaaactgttgaaagtatgagccgatttctaacaacaaatagaaatattgagttgcttgagccgtatgaggggaaactctcacgtacggttcttaggggagaagggggcagtaatgcccttgacttacccgatgtgcaaaagcagggcgacttcttcgtggagtcacctatcattctgtttgccagtattatctggtatctcaaaatctatcagaacgggaagttttgcacgtttccccatgctatcgagtttctgaaccgccgttacgaggatatatttccgatactgacctcttatccggagctggagaactacctttcgccgttcatggatgcgtggcttggaggggctgcggagcagctcatgggtcagatagcgtcggcaaaaatcccgctttcgaggatgatttcaccgcagctctactgggtgatgtcagacagcgagtttacgctggacatcaacaatcccgaagagccgaaaatcctctgcgtgggtaacaatcccgaccgtcagaatatctacggtgcggcactcggtctgtataattcccgtatcgtgaagctcatcaacaagaaggggatgctgaagtcatcggtcatcatcgacgagttgcccacaatatacttcaaagggttggacaatcttatagctaccgcccgaagcaacaaggttgccgtgtgtctgggctttcaggatttcagccagttagtgcgtgactacggggacaaagaggcgaaagtggtgatgaacactgtcggcaatattttctccggtcaggtggtgggggaaacagccaagacgctctccgagcggttcggtaaggtgttgcagaaacggcagtccatctccatcaaccggcaggatgtttccacctccatcaacacgcagatggacgcgctcattccaccgagtaagatttccgggcttacgcagggaatgtttgtcggttctgtatccgacaacttcaacgagcgtatcgagcagaagatttttcattgcgagattgtggtggatgccgaaaaggtgaaacgggaagaaagtgcctacaagaaaattcccgtcattacaaacttcacggacgaggacggcaacgaccgcatgaaggaaacggtgcaggcgaactaccggcgcatcaaggaagaggtgaagcagattgtgcaggaggaactggagcgtatcaaaaacgatccggtgctgtgtaaactgctaccagataatgagactgtctaacaagtccccaaaattgaaaattatccctatcgaagtttgaagtgacccccaaaagttggatacaatttttttggggggcacttcagttctgacgggtaaaatcgtaaaattcggacttgttagacaaatacttacgcggtttcaacctcaggtactgaatctatcgaattgacaaatttaaccaattgcggatctgaatctttttgtatgaggtttcggagactctttttcaattcataagcatcatcccctgctgtatttattaaatccatataaaaatctttgttttgcagaatcaatgaacggcatgccccatcggaaattacaggtttcactattttatcaataacgtctccagcttgacttttcaaattaccatgcgatctaagccatgtttcgaaaaattgaaactttattgcattgatagtctttttaccgatgcagaaatcatttcttatatcggtaactgtcgatttaatttttcgtttatccaatctttcaactatattcttgaaacaattagggaaaggattcaaactttgagttccagaagcaatatccatcagaatctttttgccaaattcagtcaagttatctggcaaggatttgattttagccagtaaatgttttattgcgacaaaccaataatatgatgtatgtgctgttctttgggcgtataatgtatcaacacttatttcagacaacgcttcgaacgctattttattgatatgatcggtcaggacattgcttattttagtggtcaaatcgtaaaaagatgcgtcaggaattacatctttaatattgttcttagtgatatacttatccaaatcggtattccactctgctaaatgctcgataaatacctcatccgttacacctattctgttcttaatatcttcaaattggggcaatatgtctgagagcaataatttatagccaagtttatgatttaccatgtattgtagtgtttcatttaatagcggtatattccatcccacactatttactaataagtctccatgatccacataatagtccatgagttctgcaacatattttatatctccaccctctattaaggaaacggaatgaccatgtgccaattgcatggcgactaaatcgtaatatccagactctttaatgtttcggccatcagtttctaattcagaatgcaactgatttatgtaggttgaatctaacgttacaggtaaaggtctttcttcgtcagatgccaataaacgataggttgtaaatatagcccctatattatctttatttacattctgttcatcaatgcaattcgtgatcgcttgcaaaagcgttggaaacgtataggtagaattatcttttaacgtttttacaatatctgcatggtcgaaattatcgggtagtaagtttgccaaataattatcgagcgcctccgaatttgttgctacttgataatatttatatgctttagttgtcgcgttatcccgataggcagcatctgttgcatttgcagcttgaatataatcgataaatgtatttggcttgactgtttttgcttcaatcaatgacgtaaaatcgcacgccaacttattttgcgcaataaacctgtctattgcatctaacgttttgaaatagtcgccgccattgaagtcattgaaccgaactatcttcttatataattgagcaatcacatggttttggctttccgtgtctaaatgcaacagcagttcttggtattcgacagggaacacctgcttctctatggattcttttaatttcaattgtgctattctttgccatacacgcagaataacatcgctctttcgagttaatttatgcaaacaatgtataatcttatcgataagcgcattgtccatacattgtataacttcttctaatacagtgtcaaattgtttattagtctctgcatattgatttatgtcgtggtcttcttctccgttgatgcagccttcaatatattttttcaatggaatttgtcgagcatcttcaacatcgacaccatataccaaagctgcaatttcgcgttgtgtttgcagatcattgttaattattgtttgaatgccattcagatagtcgccggacaatatttgttctactggatttgccagaatatccgtcttcttcaaacagaacaatgctatgtttatcatcaaaatttcgttacaccactcttgtttaagagcgaccatctcattgatatatgatataatttccctaacattggcattaggatttaccaatctgaatatccgatttatagtttctttcgcttcattttctgtttctccaaatgcttcaacaaacagtttgttgaatatacttcgatagtcggtaataacaggaggagcaacacgataaacaatagggaaagttttattgataaaatacttggtcagttgtttcgtttgttcgtcggtctcatctccgaatgcacaagctaaatgtgtttcatcgaaaggaataacagcccaaacattttcaaaaccgctatcggcgaagaacgtatggatagaagaccataattcttttactttttcagcggggagacgatccatgttgtcaaaaacaaggactaatttacgttgtcctttttccttgataaaatcagaaatgtcttgcatccatgttttgaactcgtaaaccgttggttcgtcttcgctcaaagtctcatagcaaacgtccttttcgactttatcttgataaatagctaacatataactccatccatatttatgatctttgctatatgcccatttccaaacgcacaatgcaataagaactggcagtgcagctatgataatagacaataaagaaaaccaccatgttgtgggtgtaggttttactgcatacgcaataaatgtaaatatcggagttaaaactgcaaccaaaaatgccgcaaccataccattactgataaggggatatttttcggttacggtctccgttttacgggctaataaatatttcagcttttcagaccatgatacggttttcgtacctccacctttgacttttattgttgcatttccagataggataccatcatcaataagtttgcttgtaagcaattccaatatagagcggcgttgcaagtcctcttgatgtccccatgcgtcatactcaaaaaagtaatagtcgtctgataattcacgttccaacattttaaccacgttggattttccagatccccaaataccttcgatgccgataattcgaggtaaagtacattcctcatccaatgaatcattctgacaaaaatggcgagcaatagtttttgccaacctttcttgcgaacctccatcgaatttgtcaataccacacggtttattttggataaaccgcggatattgctgtttggattgtagttttgtttccatatacgtaatttattgattatacgaactccaaataattctcccgatttaccacatgaaactcggcatagggataggcttcttggaaggctttcggtgcggccggcattttatttccccacttgaactccaaggcggtaagactgtcggcactctcctcaatcaggtcgatttcctgtttgtcgtaggtgcgccagaaatagaactccctgtgcagtccctcattgaagttcgctttgcgccgctctccgatgatgtagttctcccacagcgcaccgacatcctgccgaatggccagcggtgagaaagccccgataatggcattgcgaatgccgttgtcgtagaagtaccacttgccagcttttgtaacctccttgcgtaggttacgcgaataagcccccagacgatagataacgaagaccttttccaataggtcgaggtatttttcaacggtcgtcttgctcatgccgagttgtttacctaactcttcgtaagaaacttcgctgcccaactgaaaagctatcaatcgcagtagatcgcgcatcttgctcgaattttttaagccgtcaattgctaagatatctttaagcaggtatgcaccgacaatatcacgtaggtagtctgttttacgttcatagttctccatcattactacttcgggataggaaccgtaaatcaagcgcgcttcgaggttctggcgggtttcaagtgccgtttccgtctgtgcgatttcccgttgcgagaatggtgtaaggagaaattgcgtactgcggccgaccaacggttcaccagtcttattcagcaaatcgaatgacgaagaaccacttgccaagacacttattcccggtatttcatcaactatcaacttcagaatactaccgatttgtggtatgttctgtgcctcatcaatagccagcaaatcaataccatccaataaatgccgataattggctattgagcgattctccaatagtgctaatgtgtcgtagtcttcgccgttgagcatcatcgtcctacctgaatagttgtccacaattttacgcatcattaccgttttaccaacacggcgagcaccaaaaatcagtactgctttattgggcgcgattcgtgctgtaatcttctcttgaagtattctatttactgtttccataccttataaaatataatgcaaagataatcatatttttttaattggcgaattttacaaaaaaaacgggctattaaatggcgatttttacaaccacaatcttatggaagttgtttcattgtttttagtaatgatatatgttcatactatgatgactcaataatttaccagacatacgtttctgaaatttgtccttataggaatgaaaaactcacatatattgtgctaattaatatataattaaatgaaaataaaaagacaggatacgagtattcctgtcttctcatatgtaatggatatttttttattttctcatccgctccaactcctcatcacgcaacattctctcgttcagtttttcctgcatcctgtcaatgaaataggtgcggctttcgttcttccggcgtttgatatcagtgtagaagcggtagcagtctttagaatcaaccccgaatatcttatagagaagtggggcgagctgtttgagcggcatattgccgttgttgatgcagcccatcacgtctatgccgtagataagttccacgaggtcgatggcattgcccgtccattgaagaaggctggcggtggtttctgttgcgttgttggcggatattagtggtggcacttggggcgtggcaaggaatttctgcatctttcttacgaaagacagagccttgctgacgtaggcggcaatctctcttttttcttctgacagattacgtacgggatggtgctgcaactcgatttcgatgtaggcaagcgcgatgacggtaaggttcatgtccatgccgccgttgcacagttcgatcacttgggtggcgaaagccgtgtatgccgtttccatattgcagtcgccggcttcgtttatcaggcggaaaaagtcggtttccgccagcaagaaataattcatggttctgtcaattttgaaaattacactttgttttctgcgtgcgcacatgaatataattggcaaaaaacgcggcagaaaataaaaaatccaacactcaattttacaaagtgctggatttcagaggtataaaattcagtattttttcacaaggacaaattatctccgacttaaattgtttgtaatcggaacatttattctattcctgaaaatagaaatgtatgcttgccgcacattttggctatcttgcttttttatcaaggatatagataatgcgacatacaccgttgggatagcttttcaaagaggaaagcgtccagtgttgctctggcagagccgacttaaaaaaatgtcgtccgcttccggatatgaaaggaacggtgtatagtatgatttcatccacagcgtgcatccgcagcagtccgtttatatagtctgccgtgtccggtgtggcttccgcgaggtaacggatgtttgtgcagtcttttctccattcgtgcagcattgaaatggaatagtccggtgtcacacggtaaaaggctttcttcctgatttcatcaagaccgcaacggtcaaggcacaaatcctgatgtgctttatcatataactctgaagaaagacatccgtccatcgtcagtacggcgagaatctgaactttacccataatcgtttcctttcgttaggcaagggtaaaaaagtagcgtgcaattcacactaccttcaagcgatggctctggtaaagcctttacggagagtacgtgaatgcacgctatgcgtaagcatagcataagcatcacgcaatcgtctccgtagttccaatttaccagattttcgcttgaaacgccttgcggtcttatcctatatgttggcggcgaaaagctcctgccaatcgccgtttttctcaaatgttatgcaaagatagccaaattcagtgaattacgggctatgattgcttgaatttatatttaagtccatactcttcaagtttgctgtatagtgttgtcctgcctatgccgagcagttctgcggcgacactccggttgccgtttgcctgtttcaacgcacgcaatatccgctccttatcctccgcgtcattgcgcaaggcgaagctgacagtagaggtcggtttcgtcacggcaagttccagatgctctttcatgacaacaccttcctgcgcctgcaatacagcacccataactttctgccgaagttcccgcacgttgcccggccatgcgtgtgtcagcaacgctttacgtgcttcggaactgaacccgctcacgctacactccagctctctgtttgccatatcacggaagaactctgccagcggcataatgtcttcttgacagtcacgcaacggaggaacggttatcccgaagtcgtgcaggcggtacagaagatcctgccgaaaacgcttttcattcaccgatacctccaaatcttcattggtagcagcgatgatgcggacattgaaattccggtctgccttgtctccgaccgggcgataccgcctctcctgtatggcacggagcaacatctgttgggtttccaacgcgaggtttcctacctcgtccagaaacaacgtgccgccttccgcctcatggaaatatcctttcttggcattgtccgcacctgtaaatgcacctttgacgtgtccgaagaaagccgacggtgcaagctctttggagagtgaaccgcagtccaccgccacaaatggcttgcctgcacgtttgctcttgtcatgcaacaggtgggcaatatgctccttgcccgtgccgttctcaccaaatatcatcacgctcatatcggtggcggctaccagccttatgcggtgcatgattttctgaaaggcggaaccttcacgggcgaatataggcatacggcgttgtcctgcctgacgttctttcagtatggaacggatcagggggacaagtttatcctccacaagctgtttgggaatatagtctatcgagccgagtttcatgctttccacggcggtattaacttcggcgtagtcggtcataatgatgaagggctgcatctttccctcctttcgcatccagcacaaaaggtctatgccactgccgtcaggcagacgcaggtcggcaaccacgatatcattatctgttgcctgttgcagatgtttcttcgcggttgagaggtggtaagccttcatattgcggtagccctcccgtgacagcatattgcagacatattcgcaatacacgatgttgtcttccaccacaattatttttgtcttattcatcttcgtattttctcctttcctcttctgccaaccgtattatttccactcccttatccagcacggcagtcacggcatggcttaacgcttcaccatccgggagagcatcgccacgaagcaatccgtaaagtacattcagcggttggtcggcacgtagtacttcccacgagctgcgcaggtggtgtgtaagagaatccagcttttgcaggtctttctctattgccgcatcctgtaccgcctgcatctctttttcagtttccgtcatcaacttatccagcatgacggcttcattgccgtaagacagcaaggctgaaaaatcaggttctccgtccggtgtcgcttttatggcacatttgtcggaaacttccatcagttccgatatggagaacggcttgaacaggcatccggcaaagccttttgccaatagttcccctttgttacaactgcccgaagcggttgccacaaccaccgggattgttggtgaattgcccacgttggacgaacgcaacagttccagcaattcgaaaccgtttatatcgggcatattcaagtctgtcagcaacaggctgtattctttctggcgtatcatttccatcagtgccgcagcatcggtgcaagtgtcgcagtgtattccttcttgggaatacatctctttcagcatcagaagtaatacctcatcattgtcaatagcgacaacatcatggaatttattgttatgataaacaggtgtatcgcttgtatatccaagctgttcttcagcttcctgcatagaaatttcaactgtgaaacgactgcctttccctttcttgctgtccaaacggattgttccgccaagcatcgacacaatattacgcattatggcaagcccaagcccgaaaccctcctttgcggcggcatttgatagacgttcaaacgcaccgaacgcttgtttctgttcctcttctgtcatgcctgtacctgtatcttcaacgaccagtgtcagaactccattatcatattcagtaatcaaagaaacaccgccttcttctgtgaacttgacagcgtttgacagcaggttattcccgatttgtattattcgctctttgtcggtcaatacaatggcatcgtgtccagtcttcacggacaaggacagccctttgttcacggcaacaggcatgaactccgtttcaagtgtgtgcgtgattgctgaaatccggcagggtgacagacggggctgttccttgccgttgtccaggcggaagaagtcaagcaaagtgttgagcatatcccgcatacggtcggaggattgcagtatattttggatatattgcccattattaccgctattgcattctttccgcaaaagttcggtatagccggttattgccgtcagtggtgtacgcaactcatgggtaatagtatgtaccgctttctttcgggaggttatgagtacctcattttgttgcatggactgttccaattgctcgatcaaatccgttgtcttgcgtttgtatcgtttaatgttctttgcatcacggtgtatgatgatataggaaatgaccaacagcaaaagaacaaatcccatcaagccgcctatctgcataaatgattttttacgcatggctgttatctcgctttctctattttgtaaatcagattgtaccttcttttcgatttggcaaatcaatccttgcagttgtctgttaagttctgcattacgggcagcaagactatcggcttgttctgacaatcgacggctctgcgctttctgttcgttgaccatgtttctattggatgaacggagcgtagtcgttgttgtcgttggcttcgttccctcttttttgccgaagatgctcaagaaaccttttcgttttggctttttggactgttcctgcacacttttctgcacaataaccggaatttgattggctatcttcttgttaatagattgttgttcatccattaaccggactatctggaacatctgtcgttccttatcctctaaaagactgcgcacactatcgatgcgctctgctggataggtgaccttgaaacggcagagcatactgtccattgccatacgccgtgcatggtaatgctcgatatctttatcgttccattccagtatcgtttcacccaatagagaaaattttatcatttgaatattgatattgtttatttcttttcggagctcgtctatttttttattgccaagttctaatgcttctatctcctgccattcatagaggctattatatgccatacatccgataagaatggagataagtatatatcccaaccgtattgccttatagaaatttcctgaccgctccattattttgatgacattgttttttgaaacatgaataaaagtttatcgttttcgttcatgcggatattatcagaataaccgccttttgttatttgatacccgcatggcttaaccataaaaatgcctaagcccttagtgtatgaacttatttctgaggcatagtctttacttgtatttaatggaactttccctttaatatgacaccactcattattgcaactgatgtcttcaatctcagacatcattttttgcaaatctgtaatagctttggaacttgcctcctggggtatctgcaactcaaaatatagcatcggttcgagaatgtccacacctgactgttgcaaagccagcctgaagacataaggggtcagctgcctgaaatcagcaggtgtacttaccgggctataatattcggcttgagtaaaagtcactttcagatctgtcacttcccatccatgtaatcctgattggcaagacatacggattccttcaaaaacggcattttgaaaagaatggttcagataaccataggagatgtcactttcgatctgcaaccctgtccctaacggcaagggttcaagagtcagccctattgtggcccaataagggttgggtggcacttcgatctgaataatcttattgaccttttttacaggtcgttctttgtagatagtcttgatctcatcaaaatggatcttgacggaaaaccgttcttccagcaatgtctgtatgatttccttttgggtcaaaccatataacgagatttccaattcatcgctatatgagtttatggaaaaggacaaagacgggtcttcaatccacaatgtattcagagcggatataaccttgctcctctcttcgggcttgtctggccggacggaggatttgagagcgggatgctgatgagataatccttgaatcaaacaaggctcagcacctaaataatctccgattcgaaaatcttccatatcctctacaatcgcgatatcattggcacccacttcatcaacatttatctctctgccctgataaatagttttcagatttttaatcttgatggatttttccgaatcgttgattcttacaacgtctctaagtctcagacttccgtcaattatttttagaaaacttcttttatgtcctttggggtcatgctctatcttatagagataagctgaaagtctgtctgagactgatgccggaggaagtataaaagaagtgatggcgtccatcaactcattgatgccgatattgaacattgctgatccatgtagcaccggatagactttggcttttgccacaagagcgattatcgtattccaataatcagtcggtggaatttcgctatccgccaaatatcgttccaatatgttgtcgtcatggtcgcatacaaattctttgtattcttcctttatatatgtttgggagcaaactggataaaccgatccatcgacaacagtttgcatacacaggacatcttgcgacagatttgtttttatatccagatacaaacgctccaaattcacaccggcacggtcaatcttattgataaatataattgtcgggatttgcagcttctgtaaagtattgaacagcaactttgtctgcgcttgtatgccttcctttgcggataagatgaggactgctccatcaagcattttgaatgtccgctccacttccgcaataaaatccatgtgtcccggagtgtcaatgatattgcatttcaccccgttccagataatagatgtcgtagaagcccggacagtaattcctctacgtttctctatatccatagagtctgttatggtgtcaccattatccacacggccgcacttttccgttgctccactggcaaacagcagattctcggttacggaagtttttcctgcatcaatgtgagcaagaattcctaaatttataatattcatttggattaagcaataatatactacattagatgcgttgtcgaaacgcaccttttaatacctcctcgtagcatgtgagaactacaggattactaactcgtattaatatgtatattattactgccgcataacgattacaaaattacacaaaaaaatatatctaacaaaagtgggaggattttttaactttttaccatagacattttattagggaagcgtaggttcaactggtaagtacaaataagtagaaatgtttgaacaacaccgttttaggaagttgaaaaatcaagtttctctctcggtatagcgtttattttggccaatatcttctttagtttggcatttgagtatttcccattcgtgttctatttagctccttttatgagtatgtagcaagttgcttatcaaattcagcctctttgagggtcaaatatggttttgcaaatggtgactgacaagacataaacaaggtcagcaggaattttttacataaatggacatgaatgtatataacctaaaataagaataaattttaataagggctgcccaaaaagaaaaaatgcagttaccatcctacagatacttgcagagaggataaaatttacttttagaccttttgggatagcccctattaatacttcagataaaattcctaaggttatattttcaatcctttgaaccgggtttcctccttggcatacagccccggatgcccagttatggtgtgattggggataatactttccgatggattgcgtatctgcggcggtgcattttcggaatattgcgcctgcctgttccgcacatcttccgcttccggcttgacctgttgcccttcgttctccttttcggcgacttcgggcgtgggcggcgcaagttccagttgtatttttcggtcaagtgcggcaagttcagacttcaattgtttcagttcttcctccttcttccacaccttgcccgctatctcctgcaactgcggtatctcacgttccagcacttcattcttagtcttgtactggtcgatgatggaggggatgcgctccaaagcgttgaggaaattgcgggcggcggccaacgggtcagccattgccagatgtccgttgttataggtgtacttgtagttcccctctaccacgaagcggttgtcggtaaactccaatccctctttgagtatcctctcgctcaccacctttatcggaaaaccgtaaagttctccgacctgtgtgtaaagcccgcccgtagtggcgtttttcgctatctcctgcaaacgctttccgataaccttctcatcggtggaatccacaccgtccacctttattatattaaggcggttgccctccctgtcggtctgcgccaccgaaaggaagcggttccagtcctccgtcatggcatctatgacagccgtgttgttacgcaactcggctgtctttgactccagcttgaactccgaatcacgcctgcccttgttgaaagacttgcgttccccttcgagcgaggcgatacgtttttccagtttcgccttgtccagcaggtcggtgttgccggatagcaacgccatgtactccgagaagttcatgcccgatttttcgtccatagccccctcgtcgatggtacgtgcacccatcgcaccgcttttaagctggctgatgaaagtctgcttgcaatgcaggaggttgaacttgtagctgtccagtgacttctccaccgcgtagattattacgtccacgttgttcccggcgaaatgcttggcaatttcgtttccggctctaactccgcgtccgtcacgctgttgcaggtcggacggtcgatcgggtaggtcaagggcattactgccctcttcccccctcagaaccgtacgtgagggtttcccctcatacggctcaagcttttcaaagtctctgttcgtgtgcagagaccggctcatcctacttcttgtttccattgtttttacgggataatttgaaacattcatcatgaaccaacagattgcatttccgtccgtcttggacggttggcattacgttccatgccttatacgtgtcaatcggttcaccacatatcggacatttccgcccttgcttttcccataggtaaagcagggacttacgtcctttcagtgtcacaagcatctttgacttcattcttttattgaagtacaggcggcagtctgcgtcaaacggattcatatccccttttatctgcgtatattgcaggaaaggaaacgaagatgccagtttcagcaaagtgagttggtcttccttgccgtttgatttcttgaacttagccgcaaaagtccagctgttccctcggatattgtgccaataacggtcttttatccaccgttttcctttcttggaatggcggcgtttagcccattgccacaaggcgagaaatatctgatggtcgattctgtgaaaagaatcacgtgtcgccccatgctgataatatgctccccatcctcggattttagcattcaacattctgattaatgattcctgcttgcaacccttatgaccttttgtaaccttacggatattttccataaagcgtttttcggctttcttggtcggctttgtcaatatttcattgccgtatttgcgaatattgaaaccgaggaaatcgaaaccgtcacgaatgttggttatcaccgtcttttcttcggataaggtcaaacctctttcagacataaagtcggctaccaatggcttgatttctttttcaagtgtttcacggttctcgcaggtaattataaagtcatcagcatagcggacaagattcaccattggcgaatataacttgccttttattctaactcgtttatatttctctgcaaggactttctgcaatccgtccaatgtcatattggcaagcgtgggagagataatgccaccttgtggcgttccctcctctgtcgggaacatctgtttgttgaagatatagccgcatttcaaccattttcggagtattgctttgtccatagggatgttggcaagcaaccattcatggctgatatggtcgaagcacccctttatgtcaccctccaaaatccattcgggagaatagcctttccggagaatgttatgacattgctgtaccgcatccatacagcgacgttccttgcggaaaccgtacgaacgtgtgtcggctgttgtttccgacactggttccaatgccatgaggtaaagtgcttgcatggctctgtctttcattgtcggtattcccaacggtcgcagtttgccattactctttttgatgtggactcttctcaatggcttcggcaggtagcctctgcgtttgagctcacttatcgcttgtgtttttgcttcgggtttctcccatgtttccatgtccaccccgggggtgctaccacctccgttagaagtaactctctttacggctaaggcttttgcgtaaaaagagtgggtcagcgtccactgcaaggctttcaccttgcccgttctgccttccttctgagcctttacaatgcgagcttgaagcttcttaacagcctgctccgctttggtccagtctatcctgtcccaattcgtttgcaagttatcagtcggtgcacacgattggtcgaggagtttttctttgattttatcgttcatttgcattcctactttaaaaaagttctaaaagtctattgtaaagaatcaccatttggcaacattcggtttgttttgcctaccgagtgtcgccacagaagtctgcccactttcgtgtcggatgatgtcgcctacatcagcccgtgatgtcggttcaatccgtatccgttccattacagaacggcattcgctttttctgttatcttatacctgcacaccattcggctttcattgctgtcagcttacctgccatttttacatggcaggagatatacaggcttaccatgttccacatagataactaacggataggttaggttctgtctcatcctccggcggtgcttatatccgtgtaatcctaccatggaaaggattaaccgaccgcttcccttttgggtagagtgtaccagtatcttacactctttcgtgacattacgaagtttactaacagttcgcttgcgctaaccatactatcctgcctcgccactctacggtatgatactaaccgtacttgacttcccctcacggttctgtcttgtcttgcgaaagtgtactttgtcccaaccgcttaatacaactattaaggtgcatcggtggtaggctaccgctgacggaacagcgggttaaagctgatacccgtaagtatcattccaacaattatctatgcgacttcatgtcgcacccacggtgtatcaaggtgatggatagccacacaccgtttctgtgcgttcacacccgttccgagcatggaggtggagccgaacagcacacgcaccgttccggcattcatggcgtctatcaccgccttccgagccttgtcggtcttgcactcctgaatgaagcgcacctcgcttggcggtatgccgtagtcctccgtcaacttgcgcttgatttccgaatagacgttccacccgtctcccggctggtatgtccccaaatcagagaatacgaactgcgttcccttctgcgcgtcgtatttttggtaatactccgcaatcatcttggcacagtgactcgccttgttgtcggggtggtcttcataattcgggtctatcatacgcatgtcgagtgccatcttgcgggcatagtccgtggcgataagcatcttcgccttttcctccgtttccgaaagcggcagtctgcccaacagggtggcatcgccagtctttgcgaactgcatcagtttctgtatgaagtcctcctgttccggcgttggcggtatgtggtgcagtatctcgttcttggcagggcggtcaacgcccacatcctccgccgtgcggtagtccgtgatttcattatagaaggcggcaagctccggcactttgatgaagtagcggaaacgctccttctggaccacattgttcgtcacgttaaattcaaaatccgtcgtcttcttggcaaatatcgccgcccaagcgtcaaaacaccttatgtcctgccgttccagctccttcgggcgcaggtacttgaacagcaggtacaattcagtcagtgagttgctgatagtcgtgccggagaggaaggtcgcacccaagtcttttcctgtgcgctcctgtatggtgcgtatggcaaagagcatgttaagtgccttctggcttccctcgctgtttcccagccccgccacacggtcatggcgcgtgttgaacgtcaagtttttgaactggtgcgattcatcaatgaagatgtggtcgatgcccatctgtttgaaatccaccacgtcgtccgtgcgtgactttatggcgtgttccaccttctccagcttcgcttcaaggttgtgcttgcgcttctccagacctttcagcatcgcccgcgacacgttctttccctgctggcgcagcacttcgaggttttcctccaccgtgtcaagttccgcttgcaggatgcgttgctgcaactccggcgactgcggtattttgccgaactggtcgtgcgacatgatgacacaatcgtagtcgttgttcttgatgttgttgaagaaacgcacgcggttggcggtcgaaaagtccttttccgaagcgtacagaatacgcgcattgggatatgccgcctgataggtggcagcaatctccgcgacattggctttcaacccgataatcatcggcttgtgcgccaggttcagacgtttcatttcatgcgctgcaatacacattatcagcgtcttgccggttccaacctcgtggtcgcaaattccgccgccgttctgcttgagcatccagacgcaatccatctgcgagggatagacgctcctgatgccccggcttgccagccctttcagattgaggtcggggaaagtctggtgcgagccgtcatacttcgggcgcacgaaacagttgaacttgcggttatacatcgtcacaagccgctccttgaactgcggcgactgctcttcgagccattcggagaagccgtttcgtatctcgtcaatcttggcgttggcgagttgtattccctcgctgtcgcgcatcttgatgtcgttgccatgctcgtccttgccgatggacttcatcatgtcagggcaggtgttgtgcagggcgtgttttaggaggtgcataccgtcatagttccggtaataccccttcaccagaaactcgtccgtgattttcatggtgcggtagccgcacaccaccgaaaactcgtccatgcttgcggaataggcgattttcacctccgtgtcgaacagccggctcatgtaggcggcatagacacccgtcggaatccagcgttccccgaaattgaagtccagatcctcgaaggcgatgcgctgcggctcggcatctttcagagcctccaacgcctgcttcacctccggcatacgctcattttcgggattgtcacccatccatgcctctatgcgttccgctttctctatgacatttccggcgatgaaacggtctttgatttcgtaaccggtcacgagcggattgtagtagatgcgcccttgcagggcagtgagcaaatcctccgccgtgctgtcggttatctcccgcatatagtcgagattgaccgtaccatatttgttgagcgacgcagacagggcttcttcgggagagcctacgttggcatggctctccaccgcgaaggaaacaggatgctcgaagatgtccgccttgacgaactttccgttttccatccgttccagcgaaaggatgtcgcgcccgcccgcatccatcatcactaacttcacgttctgcttggcgttgaggttgccgtagcgcatgacaaactcatcgtaacaggtattcagatgctctcgccacggaacatttgcctcgcgccggagcgattcataacggtacagacgctcgtaggcgtcacgcagcgacacatacaacaacgccttttccttctggtatcctttcaggtcgagcggctggaatgtcgccccgtatggcgtgatgtctttcaggtagccgatgttatgacgcccccggtcagccaccagcgacccttcgcgcaggtgcatctccggcgtgcggtggtaggcacgcggagaaaggtccacgacttcctccttcggcttttccgcttcgatgtcggggaaaaggaaagtccccaccgcttccgatggggtatctgtaacggcaggtgcggcgactgcctccggctgtgtttcctcctgtcgtggctgctcacgggaagtttccggcacggctttcacttccgtcttttccgccacttgtttctcgttatgctgccttgccagttcccgaagttctttcctacgctccggcgtcaaacccatcatcatttcatagaaaccgttgatgggaggattggtatcccagtccagtgtggcatagatgtcgtccgggtcggcaggcttggcggtgttctccgctttcacctccttattctccattgcgggttttgcagttggagctgtcggtgtaaccgtgactttcggtttgggcggagtggactttgccgtaactgcctttttcaccgtctttttctttttggaggttttcggttggctgacctcttccgtcatcccccagaggtcaagcagggtgagctgcacgcctgcggaatattgcgggcgcggttctatctccggcttttcatctgcgggttgcggcttttctgtcggagtttccaccgtctgcgccgaggatactgtttccaattttatggcaggacgctctactttattttgaacggcaactttttcttccgttcctgcctgccggattgaacccgaatacaagcgcatggcaagcctgtaatggaaatcctcgtcgagcatacggcgcaaatccccggcgatgcctgctgccttgccctcgtgcagataaaccatagcgggcttcccgtaggggtctgtgtcaagtttcgccatcgtatgcacgatgcgttccgggtggtggatgaaataggcgttgtcggtcagggcggttttcgtgtccgtctgtatcacggtcatcagccgctcgtcctgcgacatttccttcttgctgaggttcttttgcaggacaatcaggtcactgcccacctccgtgcccgcgttgtccgtgaacaggttgttgggcaggcgtatcgcggataccagattggcctgactgaacagctcgttacgcacggaggtcttggtgctattcaataccccttgcgaggtgatgaacgccacgataccgccgtcacgcacggcatccagtcctttgagaaagaaatagttgtggatggttttctgggcggagcgtctgccgaaagagtcgctccgctgaaactccgcgtcgaacacggcaatgtcaccgaacggaatgttggacaccgccaagtcgaaataattgttgaacggtctttcgattttctcaaaaccgcaggtgcgcattttctggtcgggatagagatgcctcaagattgtacccgtgagcagatccttctcgaaagccatcacatccgcattggggctgtgccgcagcatggaatccacgaacacgccgacacctgccgacggttcgagcatacgggcggggcggacgctgtaatctgccagcacgtccgcgatggtgtcggttatctctttgggggtgtagaaagcggtcagcacggacgctttcagcgaatccacaaaccgcttgtactctgtttcgtccttgctgttctcacggataagcctgtgcagctccaccgtcggggcgaacagttcgaggtcggatttcgcccaccggacggcatccgtcagttcctttgcagggttgaggatacatttcagaccgccgaaaccgcagtacctttgaagtatggcacgctcttcggttgtcgctgtcctattttccctgtcaaggatgaatgccgtccgtatcgcctcgatgttgtcccgcagtttctgtttgcggttaaacgccatattcgtctaagtaaaggacggttgctcccgtcagctccgtgtagagcaggtcgtaatcggaagacagggcgaaattgtcatccgagaggtcatagacggagaacacgttgccgacaagcggcagcagtttcaggacaaaggcttcacgcttctcttccggcacttcatcggcaaactcgttttccacgacttcgcggaggatggcgtaacgggaataatgcagcccgcgcagcagcgtgtccatcgccagttcctgcgcaccatcggcgggatagccttcaagccgtgccctctcatacgtttcggcggcacggtcggcccgttcccgtatgaaagcggtgtcgtcagcctgttcaaacttgttcgtgcggagatagtccagcaggtacagaccgtaataggaaaagtcggtctgaccctcgtttttcttcttgttgttcattactttggatttagcggattgataattaacgggataatcggttggaaaaaggaagaaaaaggcactcggtatccctccgagtgccaccactaaatccaaagtatgagtgtaatccggtatcgaagaacaattcattactctgaacaagtggcaaagttaatactatttcttccgtcctgaaaatttcttgtcctttttagcctccgggaacacaaaagtcgtgttatattccccgtcaaaggcgacaacagcatcgaaactcttgccctgtttgctcttgaaccctttgagcagcttggtatgcccttcggtgagcaggtctttgatttcatcgtcggacagggtgcgtcccgctttcagccggaacacgggcagtccgcactccgtgttgtcgcagcgtaccaccttgccgtagaaccgcatcctgcccgtgccacacttgggacacgcgcagccggagtcacggctgccgaagagcttgtcgcacgagatcagttcggaggttatctcacgtgtgtacgcctctatctccttgcggaaggtgtcgtcggacagttccccgcgctcgatacgcgccagctccttttcccattcgcccgtcatggcaacatcggcgatgcgcatcgtcttgacgacggaattgagggcaagtcctttttcggtgggaacaagcgacttcttgcagcgttccatgtaaccgcgcttgaaaagcgtttcgatgatggaggcgcgtgtggcgggagtaccgatgccacagtccttcatcgcctgccgcagtgcgtcgtcctcaatttccttgcccgccgtttccattgccgagagcagggtggcttcggtatgcagcggcttgggtttggtctttccttcggtaatggacgagcctttcggtgtcagcgtgtcgccttcctgccagccggggatggtaatttcctctttttcctcgccatagacggcacgccatccggtttgcttcacgacgctgccttttacggtaaactccactccggcacattccgccgtgacagtggtcacatccttgacgcatttctcagagaatgcctcgaccatgcgcccggcaatcatctgatagatggtattgtcctctttggagaggaagagcggtttctcacccgtgacgagcagggcatggtggtctgtcaccttgccgtcgtccacgctgcggcgtgtcggggcggcttttgcccgcaccttgtctttccattcgggctgtgtgccgatgaaagcgagcagtttgggaatttcggcaaacacgtcttcggggatgtagcggcttcccgttctcggataggttatcaacttcttttcgtagagtttctgcgcgatttcaagcgtctgttccgccgtgaagccgtgcttggcgttggcttctttctggagcgtggtcaggtcgtagagcaagggagtttcctccgtcttctccttgcgctcggctttcgtgacagtggcgcaacctgccgcctttaccttattatatagttccatcgccggttctttctctttccatttctcggaggatgagaatttcacgacttcgccgtcgcaaccgtccgttgcgatatggagctgccagaatgcttcggacgtaaagcggcggttctcccagtagcgttcacataccatagccaacgttggtgtctgcacccgccccacggaatacgtgccgtgtccggcggcgatggataacgcctgtgtgccgttgatgcccacgagccagtcggattcgctccgcgctttggcggcgaggtagaggttgtcgtatttgctgccgtcttcgagtttccgcagtccctcgcggatagctttgtcggtgagagagctgatccacaggcgcacgaaaggagtggtgcaacccgtatagtggtagaggtagcggaagataagctctccctcgcgtccggcatcggtcgccacgatgatatgttcgcttgtgtcgaacagtcttttgatgacttttatctgcgacaccacgccgctgtcgggcttgtaacctttctccgtcctgacctgacgggggacgagcgtgaatgtgtcgggaataatcgggaggttgtcacggacaaatccgcgcacgccgtagccgtcgggcatggcaagctgaacgaggtgtccgaatgcccatgtcacggcataaccgcctccctcgaaatatccttcctctctctttgtcgcgcccacgatgcgggcgatttcacgtgccacggagggcttttctgcaatgattgtcttcatgtcttcttcttttttgttgatactttggattttattttggattcagtggcggacacgggattacattttcatgcccttgcccgttttcttctgcggcttctcctgctgctgttgctggcgggcgtccttcgggttggtctgacctttctgcaacggctctctcagattctttgtagcctcgttggtcttgccatcgttgttcaccgccacctgcgtgcggctctcgttggacggagcaacctgctgtgcattgtcagggttcgtgtcgtagcggtacgggcgtcccttctccgggttgaacttgatatacatcgtggcatggaagccctgcttgtcggtcacgttctccagcttcacggctttacccgccacatagtcggctttctgctggtcggtgaagctcacgccgctccatttgctgatggggcggatgctgccgtcctcgttcgtccacgtgttgcggcgttgctccttcttggtctgtgcggcattttccccgccctgcgcctgacttttcgatgtgtcgcctttggtttcctgtgtctgtgcggtacggggcgacttgccggttcccggcacgaactccacgccgcgctgctccacgttcacttgcagggtggtgacgaactttctgccgtcgttgcgctcgatgagcttgtcgcgtacgggcagtccggcgcggagcatgtcccgctcctgcgtggtgatttccgtcttgccgatgcgctccgggatgcgcaccctgcttgccggaatgtccgtgatttcattcgtcttgcggtcgatgctgatgtaggaggggatgatctcgcccgtttccctgtccacaatgtccacgaccctaccgagattgcccgtttcgcggaggttcttccggtcattgtcggagaatttgtgttccttgtactcatccagcttctgctccttgcggatgaagtgcggcacgaggctgatgtttccctcaccgtccttcttgaaggagaggcgggcgtccagctcgaatgattcgccgccgaaggtcggtttgacctttaccaagtcggacttgccatagttgagcatcttcgtaaggtcgccggacttttcaaggttgtcccgctttacgccccatctgtcctccagctcctgccagttgattttactctcgtcgatgggctggtagccacgtttgccctgcatctgttcggatttgtcctgttgctgttctttccgttgttccatgttctcctgtttttgaggttcttgtttctctgtctgttgtgctgccatctcttcctgcaccttcttctcatagtcggaggtgtccaccttgtgaggggcgagcagctccttgttcgcttcggggtctttcagcagttgcttcatcacctctaagagattttcagcttggtctgccgcaatgcggtagaaaccgaagcggctgggttccttgcactgccggaagaagttcttgaagaagttgtccagcacgtcgccatgtcggtcgaattgcaggaaactctgcgcgttctccgcttttgcgggggtgcgcttgggtgtgccgtccgcgttcagcccggctaccacgctgatctcgcctgtcttctcgtcacggactaccagcacgtccttttcgtcttttttctttgccatctgaaaaatgttttaatgggttatttatgaaagaaattatggatacgagccttgtagaaggctatatcttcctttttgaagtccttgatatggttggaaaggaatgtcagcacgtcctcctcgctgtaataggtcttcttgcccagcgtcttgtagggcaatgcgcctacgctgcggtagcgttggagggtgcgtttgcttatctggagcaacatgcacaaatcctgattgtcgaaaaggcggatgctttccgtgatagtgggctgtttcccctcagccttcatcgccagcagcagttcgtcctgacggtcgagccgttccatcagcttctgcatccagccctcgaagttgtttcgtgtgagcagttccatgacctatgtcctccttccttttggtttgccgcccgtgcgcagcgtgtggttgtggaacagggtgtctattgtcccttcctcgttccttactgtgttgtcctccaatagccgcagtatctcggaaaggcggtagcggcagcttccgcgtaccaccacatactcgatacggtggtcggtgcgcatacgctgcatggtgcgcttgctcacgttgagcatcttcgccgcctgtgccgtgtcaagcagcttgtcttcggtttcccgcttccgtttcttctcgtcccttgcctcgcggatgtaccctgcgatgttcgcaatctgcgccatcatctccttgtaggcggaactttccattgttatcactttcatgttcagtcctttctttttgtttctgcgacaaaattcggcaataaacaaaaggggctttaacaactcactacgtgactcacgtaagatttttgcggaagatggctccgtaacccggtcaaacggcgcaacaggcagcctttcagcggaaaacgatacgtcttgtatgccgtttcgttacctttgcggcaaactctaaatgacatgaatatggaaatagtatctatcgagaaaaagactttcgagatgatggtggcggcattcggcgcactctcggagaaggtcgccgccctgaggcgcaaaagcgacacggggcgcatggaaagatggctcacgggcgaggaggtctgcgggcagttgagaataagcccgcgcacgttgcagacgctgcgtgacaggcggcttatcggctactcgcagataaaccgcaggttctattacaagccagaggaggtgaagcggctgataccgcttgtcggcacgctctatccgcacggcagatgatttgatttattcacccactgaatccgaagttatgatgaacgagaacaacgatgtttttacgatggaagacgagccgatagcctctgtggtgcaggatatgcgcaaaggctcgaaatggctgtccgcatttctggaaagctaccgtcctccgctggacggggaacgttacctgacggacggcgaggtgtcggaactgctccgtgtgagccggcgcaccttgcaggaataccgcaacaaccgcgtgttgcccttcatacttttgggagggaaggtgctttacccggaaacggggctgcgcggggtactggaagcgaactaccgcaagccgctggagtgaggcggtttcatgaaaaagtaaacgggtgacaccttttgtggtgctacccgtttacttgtcttatggggtatgtgcaatcagcaatacccggcttttccgttctgtatgaacatcacgtatgtctgccgtttctcttgtgagagtgcctttcccaccagccatgtgcggaacaggtgggtgttgtaggtattcaccctgaaagcgaccgggatgatgatttcaagggcgtacacgtccgcgtgcagcccgttttcaagctgcatgtagcggcacacctcgtagtcgttcagcacgtccgacttgcggacggctctgatggcggcgttcactgccgggacggtcgtatggaacaatccggctatttcggtggcggtcatccacacgtcgttaccggttacgctgactgccttgtcctcgatgatgattgtgtcacgtttcatggcttttctttttagatggtgcaacctgcaaattcctcgacgccgttcaatcttgcggcaaggttctccatgtcctgattgagcttctctttggttatctttgcgtaaatctgcgtcgtctttatgctcttgtgtccgagcatggagctgaccgtttcgatgggaacaccgttggagaggaatatcgtcgtggctgccgtgtggcggctctgatgccacgtgatatgcttggtgatgccgcaacgcttggcgacggcacggataccggcaaggcacgtgttataatgcggaacgggaaatatcctgccgtccccgcacagtccccggtatttgccgattatgcggttggcgatgtcgagcaggcggatgttggacaccacgcccgttttctggcggttgatgtttatccactcgtgttcgtcgaagtaggtgcggatattctcttccgtaaggttgcgcatatccgcgaacgacagccccgtgaaggcgcagaacaggtagaggtcgcggtacaattcctgtttggcgtttttcagtttcccctccatcagcaggcggatctcatctttggtcaggaaactgcgtgttgtttcctccttcttgatttcatactcgcggaacgggtcgcgcgtcagccactcgttgttgatggcgatgaataccatcgtccgtaacgggcagacgtacagccacacggtattggtgcagcagtgcttgtccgtgcgcaggaacatctcgaagtcggagatgaaagccggggtaagctcttttagggcgatgtccttcacatggtagcggatgtcgaggaactcttgcatgtgcttgtaaacggtgcggtacttcagcagcgtgcctttggctttcatgcctgcctccacctgcttctcgtagtcctcgttgtgctggcggaacacctgcatcagcgtgtggtagcggtgttccagtccgagaaaggcgttcttcaccttctccgccgtgacgaagttgtcacgctccatgatttcctgataatgcctgttgatgcgtacccgcatcttgtcaagcatacggttcgtttcgagtgccgccgtgcttctgcccgtgacacgtccacctttggtgtcccacagtttcggatcgacagtcagtttgcagctgaactgtgtctggctgccgtccaccgtgatgcgtcccatgacgggaactgtcccgtcctttttcactacctgacgcttgaggtagtagattactgaaaatgtactcttcattgtccttaatttttgggtttcaaaattagttggtgaagagtccggtgttggtacgcaaaacggggaggaacggcgcaatctttttccgtaacctgatttttcgcatgagttatggataactcactattccttagagccttgtttcgctattcgtacccgtttgtcgcattttcgggcatggttacgaacaagtaacgtagcggcgtcaggatttggcttcggcagggattgtaatggcttcacggattatcgccacttcaaccaaaacccttgtaactcaattctatcactatatctttccgcatttcacttttttgtagtaactttgcaacgttattatttcgcggggtattagctcatctggctagagcgttagactggcagtctaaaggtggcgagttcgagtctcgcatgctccacattacaaacctctctgtttcagaggggtttgtgttttcttaagcttctccagctttcgtttttggataaaaaaaagacagtttgtgccacttttggcaaaaagaacttgtctaaaacgaatccagaacaattatgacaactcttaaagccgccgttgttccggccaaggtgctgaaaaacggcaaacacagaattcgtatcgcaattggtcataaacaggaaacaagatacatcgttacccgatttgaaatagataatactgctaattttaaaggagggcaggtggtaggtgttcctgatgccgcacatgtcaatgctaaattacgtggaatacttaattcatatcaggatgccctggataagataaatacatcatcctatacttgtacccaacttgtcgaatacttgtcctcggtaaagcagggagccatctcttatagtgtcgcttcggctgactatatgcagaatttgattaaagaggggagaaggaccttatatcaaagggcgagtgattacttcattgagtttgtcaaatatgatataatgcttgatggaattactccccggaccataaaggactttgatatttatctaaagaatgtccgaaggctggctcctgttacttgtggtatgcacatggcacatttgaaggcaataatcaatcaagcaataagggataagaaggtatcatatgacacgcatccttttgaatattatgaaagaccagcaggaatgcccaaagagcgtgatatctcggtagctgacgtaaagaagataagggatgcggagataaaaaagaagtctcagcgtgttaccagggatgtgttcatgctttcgtattatctaggaggtatcaatctgatggacttgatgcaatacaatttcaaagatgcgaaaattatggaatatgtacgtgaaaaatccaaaaacacaaagaaaggtgatatgaagatcagcttcactattcctgaggaagcaaaaccgattatcaaaagatggatggggcgtaatggaaagcttgattttggttataaatactcttatcctaattttcgtaactatgtaacaaaagaaattataaggttaggggagaggctggaggtagaatcgcatgtcgtatattattcagcccggaaatcctttgtccaacatggttttgaactgggcataccattggaaacgttggagtattgtataggccaaagcatgaaatccaatagaccgatctttaattatgtcagaattatgagaaaacatgctgatgaagccataagaaagattttagataatctaaagtgaggattcaagaactagagcgattgcttcggcagtcacttcctctttttctttgtctatctctgagtttagccgttctatcaagtccatatttcttgtgacaatcgtttttgtgccttcagaggaagaaattgtaagttcatagtgtccatagcctataaactttttagatagttgatgagcagttggggctaattttgacatatgcaattgcgttagtctgcggaaaaagaaaacggttccgctttcccgttgcgttacattctgtaatcgaaacagtgggtacattaatactccacacgggggtcggaactgtattatgaagaagctgcaggcaataaaaatcgtctgtagctcaatacgagacaacgcctcggttacttcaaaatgtaacgcaatgcaaagatggtattttatatgactttacaaaaaacaaaacgggaaaattcaagtaaagcataagggtgagagattatataatgatgatgaaaagataggagaaaggcagcttattcggctgccttcattcataaattattcgacagatactttgtgctttaatcaaatgaaacaaacataagagtaaagagaccaattaaaaccataataaatacaatcacaatataaaagacttttttcataaacaaacgatttggtttaacatatatttattcaaatatttaacaattctcttttgtcttaacaaaacctcaatctcacataaagactgaggttcagtgtatgctccttgctaaattgacacacaatattagagcattttgcaaaatccgatataaaataatgccctaaaaaataattaaaaagaacatatacatatattcggattctttattataagacaggcatgtcccaaaatctccctataggttttattgaaaaataatagataagctgcataattattgaaatttggttggatacaattgggcaatagttaggtaagggaatgtatgctttggttgtaaaaagtgaaataaaaaatccccggaagaaccggggataaacttttgttatgagatttggcttctactccaaaatcacagaacaaagatacgcaaaattctattctttatcagttgattgtataatccaattggaaaattgtattaaaaaaaaataatcccggctcgtgatgaatcggggcaaaccttatataacaaggttggacttctacgatggcaaagatcgtgaaaataaaacatacggcacgttattggatggtataatgtgccgtttcatttattaagccgatttctttttagattccaaaagtttaggaaggtaatctaaggcaagtggatctctttctttgaaatacttttctgcgttttcataaagccaacgctcattgacatatcttataaacatcggaagtgcatctataggatacataagcgcatcaacaacccttccgtcagggaaatggtgtttgtatgttttgtgctggttccacagttcggagttattctctctcatgaagcgagcgaacaatttaccaacagaaccgtcaggcatcatagttttaccatgtgcccctttatctggtatagcatagccgactttttcaagttctgcataaagcctcacatataattctgaaataacaaagaaatagttagatggaatcatgtggatattgtctttgtaccttttgataaattcaggaagagtgcctctatcagttataccgtaataacctttttccctgatagaagggacaacttcatcgaatagccatgactcaaatttttctgcatttggcaattgagaacgggatataagccgatatacattaccctcattgatgtatttcattttttgaatgccactagttgtagggggcgcgaatcacgactcccattgatttacaatatcttataattgcatctctgggatttacataacctaatactcttgcaacatcagtggcacaaaaccacaatttaccatcttcttcgatggttctaatctgattaaaggcattttcttcatcagattgataattaaataacaataaatttatgttgtaaactttttaaaaataaaatacttattatcccatccaaatgggtatggcaaatatacattttgttgtctacaaaaacaagaaaatgcaataataaaaaaggacaataaccttcacaggcaatcgtcctcatagggataatatttatttttaaaagtttcagacaatattgatatgtatggaaatattatctttccagttgcacactgcaaagtgtaatattttattttgaataaatgtatgtttacaggcaaaaataaaagtgattttgcaaaaaatagatgcaaccaagtttcttaataaaacgccccgattcatcacgagccggggaaattcaaatttataaatttaaagtcttatgatgaagattgtttgttgcgccaaaaatattggcgcaacaacatgacaacaagcaaaacagttacacaaatacaagcaaagcctatttgcttaagtaatgtggattcttttttcttctttacctcttcagtcttagttttttcatgtttgatggaagtggcttccttatcagctttgacatttgtagtatcggctaccaccgtctgtttatcctccttcttgttgaaattaccttctacatgaccgtcagccagtaacggaggtttcccggtaagactgtcgggcggctttcttgtatcataaatccgaaattaatcacgtagctgccattagtggtaatgagttcgctcaaagaggtggttgattcgtgtacgatgttgacagtttcactggcgctatccttgctgattacttctgtgtcggatttgatagccttatgcgagctaccgcatgacaacagaagaaacaggcacataaagagagccagtaatatgtgccggcttacccagttcataaccttagccaacataagagatatcatttatacggtggttcatccagccccgtttgaacttgttatttgcagggcgttcccggcatatatcctcgatgaaatcaaaccctgcaatcttgatctgatcaaacagttcacgtggattacgggaatttactgcagcgagtgtcttaggcccgacaatgccatcaggaatcacgccaaccaaatcatgcggtattttgataccgtgcatttcgcttgcccagacccaatcgacaaggatatcagctatggattgggatttaatttcgtcagctttccacctgtcccaatacatggttttcaaaatctccgtttattcctctttcgtgatgtttttcaatctttcaaccgtaggcttgggatagcctttctttcggcaatacgcttcataagttccaatggtcacacccatattggtagtcactcctaaatcgtccgagtcatttacaaaaccgccttcccacttcaggataaacggtgcaagtttattcacatcagccatttttcttttcctccttatctttaattaatgtagtcctgcgtggtggaatacggcgaccgcattcgctatcgggcctgtcacaacggttatgctcggcatctttcaattgcagttccagctcgtggcacttatgaatccatgccagcttatcagactgttcattacgaagcttaacgtataacgcatcaatcttggcgtcacgctgggcgatgcgttcttccagccagtcaacctgcttacgcttgttctcatcctccatcgaatcggcggacgcatcctccttccgtgcgttcgtcttgtggttcacccagaacgtgacaccccagcggacagccttcaatcccccgaaacctccgattatagccaaccagtcgtttaattccatttcgtctattgtttatctgattataatacaacttcaaagatatgtctatttacttgcgtcattgttgcagaattacttaaatccattgccacgatatgacaataaaaaaagagcctgatgacaatatttattgccatcaagctcctggttactctgcaaagatagtgaaaactattccatattcaatccatattgaaaaaaataatcaggagcaatattctgatcatccgaaaaacttaaagaatcacaatgttaatagaaaacaaataggattcatgaaatctaccggttatctataaaatcagatgttctcaaacttttatcgggaaatatctttacttttctccttttcctttgagcgtttttcaagtcacgtactatggtgctggaaagtatctctgaataaatctgtgtggtctttacggaagtatgtccgagcagcttctggactgttgtaatcgcaactccctgatggatcagcagggtggcacaggtatgacggctcacatgataggttatccgctttttgataccacacaatccggccagctttcgaagctgcctgttcacctccgagttgcaaggcagggctgcaagactgccgatatccggatagcggtcaagactgcccaatgccctgctctcaaaaagcaaatgcaacggcagacggatttccacccctgtcttgacggatttgaagtacagccacctcttgccgtttatcctgataaaattctcaggtgtgagctggcagaaatcagaataacgcaggccggtataacagcagaataggaaagcatcgagcacatggcgcatggattcctcttccacctcaaccgtttccaacttcttcaactcgtccgggataagaaactcatgtctgcccttctcctgcttgattttgtatttccgaaagggataagcgtctgcgtgcatgtatccttggttgattgcctcattgaccaaggtacggagctgtctcatgtgcttggctatcgtattgaccgcattgcccttttctctcaggtattgttcaaaatcacgaaggaatgtataggtaagatccttgaagtccagtccggagcggaaatcatgcaggaccgccagtgtcgtatgcaggttatccttggtggactgcttcttgtccgaattgtcaatggctgatttggcgaaaatggaaaagctgatattcacggcacttttctttttgacggcatctttcagcaaagagagtgtggcaggtattccacgcttccaatatcctaactctataccttgcagatacaggatgtattcatagagcattgcgttcaactcatttgactggggatggttaatgacttgtgccccttcacggctccagcactccggtttgaggtacacatttgtcttcagatagattttcctctggttcaaataggcttcaatttgtacaagggctgtgccctgtttattcagtttcttttggcggttatatacaagacggtatctgattttatccatttttctgcaaagatgtattctctgtctcaaacggcaaaatttttagtctacaaaaatgcaccctcactttcacaaggtgtatgatgatggatacctttatataataaatatggatgaacttgataccgattcattgagtaggatatataagaggattgttccctgataactctcgccttttcataccggttatccgcatactccccgtttccgacatgatggtattctaaaacggcattttattacaaaaaaaatacatttgtgaataattagtaccattctgaaggctgtatccataccggacgatgatataagggtgtaaaatatcaatttgctgataactaaccgtataatacccgtttgatttcctgtttttcatgttcttacagcaatattatattataataaaggatttaataattaaaaataatttaaatgttataaataggccattttttacatttacccatttcttctgtttcttctcccatgagagcccgtacgtatagtaaaaaatgattttattccggtttttccgttcttttaaaagtatttccagataaaagggagaatattgtggaaattccggtttgattttaacataaaagatattgtaattacttttttgaataacttcttttgtaaaagaaagaataaaaaatgtacttggtaacactcgggatttaacaatgttaaaacctgatctaacatcttgggaagaatgaataatggaattgtgaacaggctgtttcttgcggccctgctgttcgtctgcactgacttgtgcggtcagaacgttcagataaagacgaatcttctttatgacgtcaccgccactataaatatcggttcggagtgccgtttgggccgtcgttggagtcttgacctttcgggcagttacaacggttggaagctgggcggtgacaggaagtggaaacactggcttgtgcagccggaaggccgctactggttcggctccgccttcaaggggcattatgtcggtgtgcacctccacggcggccagatgaacctgggccatgtgggctttggggatcatgcgctcagggagcattacaggcaggggtggttctacgggtgcggtgtcggctacggataccagtggtttctaagccgcaattggcgcatggaggccggtcttgggctcggatacacccgttttgactatgacgagtacggatgttccatatgcgggggcaggcttggtgaaggctccaaaaactactggggtgtcaccagaatatcattgtcggttatctacagtttatgacataacaaaaatcagacaacttatttattaatctaaaattgttacattatgaatctaaaacagttaagtttggctgcgctggcatccatggctttgtttgcctgcagcaatgatgagtctcttggcggtagtgacgagaatggcactccgaaagccgtgtatatgaaactggagggtatttccgcctccgctgtgaacggacgctctacggatgctccgactgaaggcggcaatcatacagttaccgtaagtgatgtcgctgtaatattctatcaggatggaggaaatatcacggatatagaagaaataacaagtgctgacgacaagaaatggaaggcacttgttgaccctgaatctggtgatggatatagatttgttgtcggccataaagccgacaaggtcatggtgataggcaactaccaaaatttaaaagagaaaacagacattgagggaaaggtggtggaaaaccagcctatttcaggggtgaaagattttcagattcctttgagcagccagaatgtggcaggaacaggcactgatgaaacaaccaaagcctgtgtgaccttgcatggtgacgctccgatgaccaaaaaggtaggtgaaaaagctccggaagacaatgattatgatgtatatgaggcacatgttgacataactcccatcatctcacgtgttgagataaaatcattaggatgtgtattcaacaagcaagatgaaggtacagcaggcactccgacagagcatctgtacacctcagtgaccgtcaagggtatcggcatggtggattattataacatgggtactttaggaaaagattataatactcagatggtgaccaatactacatcaaatccagacggtttgatttacgatcctgaacatgcttctgttccagagggaggttacaaattctgtggcggtgagaatgcatcatggggctggtcttatgacatgataggcgcctccaatgggataacattaacttctggcgatgtatcatcgggttctgtcacaaaatatgtgggtgcaactgctgaaacacaaactcagaatgaatctcaaacttttgcctataacttcttccccaagggtgagatagccaatgtcagggtatgggttgaagcacaaaaggaaagtgagaatgcaaagaaatcttttgttgtcaccgcgaattttaaagataaagaagatgggggtacagttgtggaacctcaggccggcaaaatctaccagtttgactacctgttcaatgagactgttccgggtgtatgggacaaggaccagaaggtggtgtatgtgaaagtgacagtcaaggaatggactattacaactgtttatcctgatttccactaatccgatatcctacggtttataatccgcggttgccggctgtcatgccggtcgccgctttaacctgaaacgaagaagaaagatgctgaaaaagaaactgttcaccggtatttgtctactgtcactcctttcaggctgtgtgctggacgaccttcatgactgcccgggccatcctgacaagccggttcctcccaaccctccggaggaaactacgcagttcctgtatttccggtatacgggagacggtgacaccgacctgctgacagagaggatctcatgtgtcgacatgtacgtctttgacagcggggaacgtcttgtgagcacgctggagattgacgcggaagccctgagggcgaggcatggcgtttccattgacctgcctgcgggcaattatacggtggtctgccttgggaatgcgggcgagcgtacacaggtgagtgatctgaccacctgtgaccttcatatgatgttcttcgcccatcccggctacttcatgaatgacgagagcatgctcaccggcaatgacccgctgtatcatggcgacttgcggttcagggtggaggacgggaagtctctgaaggacaccgttgattttaactcctcccatttgaaggtctatgtcgaggtgaaagggtacggaacgacggagtatggaaaagacggcggtgaaccggatatccgcctgcacaacatgccgtgccgtgtgttcttcgacaaccggatctgcccccagagacgcacctaccatcctgaagtcgggagggagggcgcacaggacatgtatgtgggaaaactctgtaccttccggttggacgggaaccatccggctgagatagcgctttacagcggggcgggtacggagcctttctatacggtcgatgtcgcggatttcctaaagaggcacccagaggtggacataaccaagcaggaggccgagctttccatgcggatagaattcagggagaggaatgcgaatgtgacaatcaccgttccccaatggggggtggaggatgtctatcctgatgttggtttcgaataagcggatatgagtatgaacggacttaaatatatatgccttgcctgcattattcctttcttgccgtcctgcatacaggaggagcatacgggggatgcgggcgatgacggccgtgtgacggtcagtctgacctttaccacccgtacggaagagggtgcggatgaaggcatggaaagcgacgaagggaacaatgagaacctgatcagaacggtcagggtctatgtctttgacgagagtgatggcagcctgacaggttatcaccatgcggatctttctgataagaatgtgacggagaagtcttttaatataagattggggttctccagacacacgattcccgccgacggccatacgtgtttgttttacgccatagccaatgaggggagtgcagaagggctgaaatccctgccggccgctgtttatgattctgaaaccgggagatatgtctggacggacgacaaggagataacacagcgggaactgttggagttgacattcagtgggcttcctgagagcaagctgaccgaaggggatccggccgcgaaagacgagaccgggaagaagtactcaagttccattcttcccatggctgtgaaacaggaggttgtcataacgaaggagacggaaaacctgacacttcccctgcggcgttccgtgggcaagatggaactttatttcgccaaaggcggcatcggtgaaggtgacctgtatatcgggcgcggagtatatctgtacaacatcccgacgaaaggatatctgtttccccaagatgctccggcgttggaaagtagtgagatagcccatagggaaagtgataaaggcgacacttccgactccccatatcagaagaacggtctgccgatcctacgttgcggctttgaggatacaccatccaacccggatgaaatcgcacaacttcacatcaacaagataaccagaagatggaacaacaaggctccggacgataatacggatggaaagaaagagtaccagtggcttcccggaaaggcggtctacctgtttgcaaatccttacaaatcggataagaatgccgccagtggggtggaaggtgacgggtattatatgaagattctgcaccacagccatgaaaacagtgatacgggggcggacaaggaggagtcccatatggattatgtcacacttccagcggtcaaacccaacatgtttgtcaaggtgttccttgtcatccccttggatgggtatacggccactagaacatggtggaaagtcggagactggacggaggtcgagaatcctggcattagttttgattaacaagaacatttatatatggcaatttttatgaaaggtatatcaagatacatattgacgatgttggtgccgttcctttgcctctcctgcacggacgagataccgatgccggctggctgcggtgccgccggtggcgtggaccgcggcaagactgtgagggtgagccttccgttcagtgtcagcggcggcatcagatcggatattgtcacccgtgcggctggcaccgaggactcccgtctgggcaggatcatgctgttcatgtatgagaataagggtaaggaccagagccagaacaagctactgggatacaggatattcctgaactccaatgaagggacggtcaataatgaggaagacggcttttggacaggagaaggaaatgagggaagactgaacttctatgcctatccgggtgatgtgtatatctatctgttgggaaatgtgacaggctccttcctcaagtattttcccggcatgcaatcggaggaggagcttaaaggacttaccgatcaggaaaaattctttcaggcggtccgtcccacatggacgggcaacttcaacatgacggacggttacctgccgctggcaggctccgtgaataacagtactgcggcatgcaggattggcgaggatggtactgtcacttatatggatgatgctacaggcacagaaacaagaatagactcaataaataatcctttccttctgaaacgcctgatggccaagatcagtttcactttcaagtccaaggagggagtgaccttcaccccccgtagctatcagttccgtcatgtggccgagtgggtatcccccaaattcagccaagacaggacagataaaataggtgtgactgacggggagcagactccttttaacccccagactccaaactcttttctggtctatgttccggagaatatggcaagaacacaggcaaccggtataacttctttccatgaccgtgagaaaataaaaaagggttccagcggaataaatcttaaagaaacccaggagggccatgaatcacattatcagttcgaaaatgctccggagaacaccacctatgtggaggtgacaggacatttcaagggaaaagataataaagggatggaagtggaggcggacgtgaaatacaccatccatctgggggatttctctgatggcaattttaataactttgatgttgaacgtgaccattattacaaatataccgtgacggtcaatggtgtggacgagattatagccgaggttgagacaaaccgggagaatcagccgggtgccgagggcgtggtgtttcgtaaaggctccaaggtccgtgtggacgcgcactatgaggcggtggagatgaatataagaaggagcgtgcttgagcagggtatctatatatattgcaaaactcccttcggaacggttggcgagatgtactatccccaaaagggagctgatgatgcaaatttaagagcaaaagagatccttatgccctatctcggatgggtcaaattccaaaaacaggatacaaaaggggaactggccatatatgatccgaaggaaacacagaatgtatttgaagtcctgcaggaagtctggaatgaaaatggagagggtgcatattacacctgttttgtagacgagtattattacgaagaaaatccagtcaataagggaaatgtcaggctgaacgagtttgtcaatgccgatgaccgcgtgtttaccctggcaacctccttgcagtatagtaaggatcagcagagtatccttgccgacgctgtatattccgtcagccagcgttccatcgcctgcttctatgaccttgacaactttgagggtaatgtgtacggggtggagagtgttgacgagacgggcgggttgtattgcagtgaacggttcgaccaggatttatcattatcagagaatcctgacaaggacggccgtggaaatacgttggcacagtgtggcgcaaacggatatggttatgtaaactggaaaaagaacgggtatctgttgcagaatgacggcagttataaaaaggaaggcgggtataccacattgtcttatgatgggcagtattcttataaggcgtgggccggccgtaaccgtgacctggacggtagtggcacgttggaagagaatgagatacgatggtacgtatgtgcgagggaccagattatcggcatgtggatagcggaacctgcacttcctacggaggcggtcctgtgtccggaagacattgaaacactgctggcgggtaagacgtctgagaatccggttgcccggatacacacgaattcgggccggagcagccgtcttgtctggagcgagcagggatgcagtttcggtggcgaacacaaacgggaacgggggaatatccgatgtgcccgcaatcttggcattacccaggctgcgaaacggaatacaagccataccattttccctgatagatattatgaatatgacaatacgacaaagaccattacaatgaacctttcgtctatcgcattgagggggttcacgtcaagggaactggcgccccacaatgagcgcagcgtcataaacagggttccaaaggttctgcaggtatcaagtgatttcttgtatggaaaagtcagacaggattattgtggtggacatggcttgattgtgaaggaaagttcttctaaaaaatattatccgtttataacctctacagcaaaggatgccaaggatgcctggataacagaagctgccagttatgtggaacaagacagtaaggtaagttccgttcagaccagtgcgtcatggcgtctgcctaaccagcgcgagctggcattgatcgtggtggccgctcctgaactcttgagaaagacaggcgcacaagtgggtgaaaatacctatgattacaatgacacgtttatttataagaaagaatgtgagggaaacatgtttagtggtcataattggaagaatcgttatcgggcctccattcattgccgcaccagattttctataaattcaggacttgacggaaatggaagttatacagtgtatgggtattgctgttattataacgagaatggttcaggacaggcaactgatacaggatttctgggattgatgagtattggttataacaatgagtggttgggttatggtgatgcgggctatgctggttaccgttgcgtcagggatatagaataatgctagaattattaacagtgatcataaacagttcgctcatacaggtaggaatttaaacaagaatttctgcctgttggcgatctgggggaactgataggaataaatgatacatggttaagattcagagatgctagaaatatagattcccaagacgaattaggctctatgcaatatagtggaatgtacttactaagagaagattcagaattagaatatgtccgtaattgtatattagttgtaatcggtaatcctaatatctgttgtgttcagaaattatataattataacggaagtatctataaatatagagtgaaatggtatagtaattattgggataattggtgaaccgtatcttgggtataaaaaaacggatggtccggtacaagccggttccacccgatcctgatatgcacaacgccatgtgcagtgcaaaggtaataaatatctgaataaaccgctatatttttcaagatatagagatttcttccaaatctgatatactgatttgatctgtcacgtctgtgaaataaaatttattatgattatcagagaacacttcaatattagttcgtgaccatgtacttttataaatgtaaacataaaaacttgtttcatctttaaaaagtctgatattactccctccctttgccaacaacatgtctgtaaagatgtttatatctgaaagaatcacacgaataaagcagcatgtagataatgtgttattaggtgcactatagatatataatcgatggacaatattttggccataatcaggccaatttgccgaagggtgaagtgtgttaaataaatggtttatgttattgtttattgtttgattttcgtatatttgcaataaatcttaatttgaatgggaagttggagtgaacaacaggaagtaaagaaggaagttaaagaaaaagagaaaacaagtcgggaaacgcttggtaagttcttttatgatttagcaaaaatatcttttactgcattagtggtaggaagtgttgtttctgttgcgacacaacaagaaaaagtagaaaattgggtacttatacttataggtatttttgttacctatatatttcatacataggttataaaataataaaacagtaattatatggaagcattaatatctttatttgcggtaatggctgtgataggttctattatagctgtttggcttaataccaagtctggcaagaaatggctcgcaaatctatagtgtacttttcattggaaattgagggtattatggacgcattaggttttagtctggcaacaaaaagtggttggctggtctgtgctctctgatgccttacaattttggttaatgtatgaaaaggaaatcccttgaatgtttatggtcgttcaattatagtagtgagttgagcggctttttagtatttggacgttagaacagggaaaataatgaataaaatagaaaatcaagatgatttttactaaaacgaatcttggaggattttgaatgggtagataaccttctgcttgtcagtatagtaagcgcagatcagaattcatactggcagtctaaaggtggcgagttcgagtctcgcatgctccactttttaatgagaaaatgaaggtctgcggagcaggtcttttttaacttaaagactataaatatgttaatttataatacaacttatcaaacaggtattgacgatgcgcgtaattttgtcatttggcttagtgaaagctacattcccgaagtggaaaaaacgggaatattgcaaaatccccgtcttacgcacatccttagtcataaagagcaggattcagaatgtttttcattgcaatgggaggtggaagatacagcgaccttacaccgctggcatactcagcaggggatgcatctgaatgaggaaatgatgaagatatttaaagataaggtggttggctttcccactttgatggaggtaattaagtgattcagccggtaaaagagaaaatcattctgggtatagatcctggaacaaccataatggggtatggtctgctgaaagtagtaggtactaaaccgcaggtaatgactatgggggtcattgatcttcgtaaatatggtgatcattatttaaaactgcgccgtatttttgaacgggtggttggtataatagaagcctatttacctgatgaattagcaattgaggcacctttttttgggaaaaatgtgcagtcgatgttaaaattagggcgggcacagggggtggctatggctgctgctttgagccgtgatattcctataacagaatatgcgccgttgaagataaagatggcgataaccggtaatgggcaagccagcaaggaacaggtcgctgatatgttgaagaggatgttacatataccagagagtgatatgctgccttttatggatgcaacagatgggttggcggctgcttattgtcattatttacaaatgggcagaccgacattgactaaagaatattccggctggaaagattttataaataagaatcctgataaaataaaaagataagattatgaatgtgagacatgttatttgggcatcaattgtttctactactattagttgtcagtctgtgaaaaaagaatataattcgtttgatgaatatcctgtccgtgaagatgcgctgactgaaatggagtactcacctgccgaaacaaagttttcactttgggctcctacagcggaagaggtgcgtgtccttttatttgaatcgggtaatgaaggttcagcttctaatacttttccgatggagatgggagagaatggtacctggactatttcaataaaagaggacctgaagggtaaattctatacctttaatgtgaaggtgaacgggaaatggttaggagacactccgggaattatggcaaaagccgtaggggtaaatggtaaacgggcagctgtgcttgatcttcgttctacagatccagaaggatgggagaacgatgtgcgtcctcctttgaagaattatgctgatattatggtttatgaaatgcatcatcgcgatttctctttggattctgtttctggaattcaaaataaaggcaagttcctggctttgacagagcagggtactatcagttcttcaggcgagaagacaggtattgaccatctgaaagaactgggaattacccacgtacatttattgccgtcgtatgattatgcctcggtggatgaaacaaaactggacaaggcccaatataattgggggtatgatccgcaaaattacaatgtgcctgacggctcttattctacagatccttataaacccgatgttcgtatcagggaattcaaacaaatggtacaagctttacataaggcgggaatcagggtggtgcttgatgtggtgtataatcacactttcaatacagacgaaagcaatttcgaacgtacggttcccggttatttctatcgccagacgaaggacggacaatgggcaaatggttcgggatgtggaaatgaaacggcaagcgaccgcgccatgatgcgtaaatatatgatagagtctattctatattggattaatgaatatcacatagacggctttcgttttgacttgatggggatacatgatattgaaaccatgaatgagatacgtgcggctattgataaaatagatccgtctattttcatgtatggtgaaggatgggctgccagttctcctcaattagaagcagacaaactggcaatgaaagccaatgtggaaaagatgcctcgtatcgccgctttctcagatgaaatgcgtgatggtttgcgaggtagttgggatgatgataccaaaggagcttttctagtaggggagccgggacacgaaatgagtatcaaatttggagttgtgggagcaatcgaacatccgcaggttataagtgattctgtgaattatagtaagaaaccttgggcgttacaacctacccagatgataagttatgtaagttgtcacgatgacatgtgtcttgccgatcgtctgaaagctaccatgccagatgcttcggtagaggaactggcagctttgcagaagttagcggaaacatttgtctttacttcacaaggagtaccgtttatatttgcaggggatgagatgatgcgtgacaagaagggagttcataattcttataatagtcccgacagtattaatacgatagattggaaaaataagaccgtgcataaagatgtgttcgaatatgtgaaaggtttaatagccatgcgtaaagcacatcccgctttccgtatgggggatgctgatatggtacgtaggcaattggagtttttacctgtaaaaaatacgaatgtggttgcctttatcttgaaagacaatgcaaatggtgactcatggaaaaatatcatcgtagctttgaacagccgtgcagagcctgtcaagttggacattccgtcgggtaaatacactgtaatctgtaaggatggcaaaataaatatgaaaggcctgggacaggtttcaggtgctgaacttatggtaccggcacgctctgcaatgattatacatcaatagaaaaaggctcaaagaagattaataaagactttgtcgtacagactaaaacacataatacgaatggaaaagacatggagatggtttgggaggaaagataagataacgcttcccatgcttagacaaatcggggtggaaggaattgtgaccgcccttcatgatgtacctaatggtgaaatatggactttggaagctattaagagtttaaaagattacattgaatctcaccaattgcgctggtcggtggtagaaagcctgccggtaagtgaagctatcaaatatgccggtcctgaacggggtcaattgatagaaaactataaagtaagtctggccaacttaggtaaagcgggtatcaagaccgtatgctataatttcatgcccgtcattgattggatacgtaccgatttggaacatccttgggaggacgggaccagttctttgtactttgacaagatccggttcgcttattttgattgtatgattcttcagcgtgaaggggcggagaaagactataccgattcggaattacaacaggtgcgtgaattggataagactataaccgaaaccgagaaaaacgaattggtcgataccattatagtcaagacgcagggatttgtaaatggtaatataaaggagggagaccggcatccggtagccatattccgccgtcttttgtctttgtatgatgggatagaccgtgatgccctgcgtgaaaacttacgttatttcttgcaggctgtcatgccggtgtgtgatgaatatggcataaatatgtgcattcatccggacgatccccctttccaggtattgggcttgccgcgtattgtgaccagtgaggaagatatcacctggctcctccatgcggttgataactcgcataacgggctgacattctgcgccggttcgctcagtgccggattgcataacaacgtaccttcgttggcacgtatgtttgcgcaccgtactcattttgtacatttgcgcagtaccaatgcatttcccaacgggaattttatagaagcatctcatttgggagggcgtgctcatgtgatagagttgatccgtatttttgagaaagagcgtccgggtgtcccgatgcgtgtggatcatgggcgcatgatgctggatgatgccggcaaaggatacaacccgggctattcgtttcatggccgtatgatggctttggctcagatagaaggtatgatggcggttatcaacgaggaatcaaaacttaaatcctagattgacgtacatactcactttattggctcggtttgcatagttcagtgatgcctctaagggcccgaacatactatccaaaccgtagccgataccgcagccgaacatggtgtcctgttccaacagatacctcagcttgcttgcactcagcgcataatttcccgttagcgtcagataatgtacacttcccatccgttggcggaatttcatgcttcctatcagtagcgtatttctcattaattccacattgtttattcccacaaacggtagttgttgttgcaggaagcgtccttgcacatctccacccattgcattaagtttggaatatggaatatcttttcctatcaggaatcggccgtaaatggcaggcagtatggagaatctgcgtgtaacagggaccactccctggcaataaccttttatggctgaaaaaggggcatggccgtcatatccggtaaagttgtcggtataaagcgaataagaggctcttgccgatatgcctttggttgggaagtacgccttgtcgaaagtctcgtaatgcatttgtgcgaaataactgaagaagtgttctgttcctacgtcaaaaccctgattgccttcctggtataaaaatttgtcatagtcatacaattcataccttaatccgatagcaaaacgcacattcttgtaccatacatccgagaatgacagttcccccaaatggtagcggaaagtggagttatgtgacttatctccataacgatagaaattaatatcattgtattgaaacatatatgccagcccgatattcttcaaaggagccggttcaaatccataatctatgcgcgcggcataacgtttccccagtcgtcctgtcaaagacagcgtagtgggtacttttccccggaaattgctggtgacattaatcagcagactggctgtttcttccgaatcaaaacgaatccctacgtttagtttattctcatatttcttgcttagaaggaaatgtaaattatagcctccgccgggggcttcgggcagattataagtggcgctggaatattccaggttagaacacaatatggccgttgcttcttctatgcggcggatgcttatttcagaatcctcctttaaatcacagcgtttcaacagccatcgcttgtctttctcgtccagcccgtcgaaagtgatttcttttatatacactttgcggctgggggagtacggatagctgggaagaggtttcggcatataggtgctgtccagacccagttcctgcttcagcttcattaaagcaccttcttgtgccagtgccgcttcttctccccggcggatcagtgtatccactgcattaggtgtgaagctggcagctgaatatccttccacattcaccttgatataagcattggtctcttccaggttctttttataaagctgtaatcccatcaagttgatgagctgccccaaaatactgccggcgctattcagttcgttggcaggcttcaagtcactttgtacgtctactcctataataatatccgcccccatggcacgcgcaacatttacagggtagttatttaccacacctccatccactagaaccatactgtccagccggactggagtgaatactcccggtatggccatactagccctcatggccgtagccagtacacccttatgaaaatttacctcgttgccatttacaatattctcggaaacacaggcgaagggaataggcaacttgttgaaatcgatggaatcatgatatcctacggtcagctcgctgaacaggtttgccaagttttgtccctttatcaatcctcctatggcttgtgttttggcatcttttccgaatggaagagagaatacatacttttcagcggcctcccgttccgccatattttgttcactgcgtggtattttgtcactcagcagaaaagtccagtcttgccggcgaaccatgctgtctaattgttcgggagtataaccgatggagtaaagtccgcctatgattgatcccatgctggttcctactacataatctatgggaatgccggctttttctatgacctttaaagcacctatatgtgccattcctttggctcctccgccactgagaactatacccaccttctttcgggagtgtggttgggctgttatgtgaacggagatacaaagtaaccctgctgctattagcaaggtagagaatttcatctttttcatcttactataaatctagtctaagttaaaaaacaaaaacagtgcaaagatggtttaatctttcagcttttacaagtgctgattgtcacagatattggtctattttgctgctgaggtttcaaagataagaaattgtaccggaaaaaagaattttgtatatcgcttttttgtcgtacctttgtctgtgtaacgaaaaaagtatggataattttgcagcaatagacttcgagacggcaaataatgaacgtaccagcatatgtagtgtgggtgtggttattgtgagaaatggtgagatagccgatcggttctacagcctcgtccatcctgaaccggattactatttgtattggaacacccgtattcatggattgacacaggaagatactgcccatgctcctgttttttcagaagtatggaaacaggttgcccctaaaatagaggggcttccgctagttgcgcataacaaagcctttgatgagagatgtttgaaagctgtgttccgtacttattgtatggattatcctgattatgacttttattgtacctatcaggcttcccggaagctgaaagggttgagaaaccaccagttacatacagtggccggttttttttgttttgaattggagaatcaccatcatgcgctggctgatgctgaggcgtgtgcatggattgccagacagattctgtgagttataattaaagatttatgatttctgaaacccatgatacaagaagatacttataaaaccattacagacattgccgaaggcatatatacggagaaacggagtaaatttatagctattgccattccggtacgtaccatagaggaaataaagcagcatcttgacgcgtatcagaagaaatattacgatgcccgtcatgtgtgttacgcttatatgctggggcatgaaaggaaggatttcagagcaaatgataacggggagccttcgggtaccgcaggaaagcctattttggggcaaataaattctaatgagttgacggatatccttgttatagtagtccgttactttggaggtataaaattgggaaccagcggactgattgtcgcttacaaggccgccgctgccgaagcaatagctgctgctgatatagtggaaagaacagtggatgaagaaatcaccgtatcctttgaatatccttttatgaatgatatcatgcgcattgtgaaagaggacgagcctgccatcttggagcaatcgtatgatatggattgcctgatgaggctccggatacgtaaatccatgatgggaaaactccgtgcacgtctggagaaggtggaaactgcccgtattattgaataactctgtcggtacgtcgatatttcttttggtcatattcactgcgttcacagcagatgagaagcatacggaatgtgactgtaaaatgtattccccatatcaaatgaaacagatttgtaatatgaatgaaatgttacagatataccgaacctatatctttgcagccgtaaacaaagaaagtcacattaataaaaatgagaaatacacttgtagcgtctgcttttacaatgctgagtattgcaactgcttccgcacagctgactattcctaaagaatatttgccggaagtacatggaacgatccgcggtaaatatgaacttcaaaccactaacggaatgcaacggttccaagtacgtaacgcccgtgtcagtctggacgggaaggttcttccggtaatcgcttataaagctgaaatagacttgtccgatgagggaagtatcaagatgctggatgcatacgcccgctttgtccccaatgatacatggaatgtcacactaggacagatgcgtgtgcctttcaccatagacgctcatcgatctccccaccaacaatattttgccaaccgttcgttcatagccaaacaggtggggaatgtgcgtgatgtgggggctaccggagctttctctttaaaggagggactgccgttgaaactggagggcggactgttcaacggctccggactcaccaatcagaaagagtggcacaacacgttgaattattctgttaagcttcaattgatgccgtggaaaaattataacttgactttgagtacccagaaaatacatcccgataaaatcagcatctatatgtatgatatcggtacttactacgagtttgataattggcatatagaagccgaatacctttataaaacttatgcgaaaaactcatttgatgatgtacatgctttcaacgcctttgtcaattacgacttgtttatcaagaaaggtctgtttcagaaaatttcatttttaggacgttatgacagtatgggagatcatagtaacggtaatgcggatgaggatggtaaactttacattaccgattattcccgccagcgtgtgactggaggtgtgacgttaagctttggaaaggcttttcaagcggatttgcgtcttaattatgaaaaatatttttatgataaactttctttggcaaaggagtctgaacaagacaagtttgttatggaattaatggtacggttctgaaaaaagtagggcaagtaggggaccctacttttcccggaactcaccgatatatccgtgctatcttatcgggagacaagcctacccccatctctctttcatcatatcttccagtttcagcaattcatccctatactgtgcagcttctataaattccagcttcttggcagcttcctgcatcagtttccgggtacgttctatcgttttctccatctgtggcttggtcatatactgaacaatcgggtcggcagccattgtattggaagatggctcaatatatgccttggagccttgagtggttccggccgcttcgttgctgttgttgcccaacaaggcagcattacgcgcacgctgtatttgtttgggggtgattccatgctcttcgttatatgccagctgtttttcgcgacgacggttggtttcgtctatcgtttttttcatgctgtccgtcatgcggtctgcatacatgattacttttccattgatattgcgggcggcgcgtcctgctgtctgggtcagcgaacggtgggaacggaggaacccttctttgtctgcatccagaatggcgaccaaagacacttcgggcaagtccagaccttcacgaagcaagttcacacccaccagtacatcataaacgccctgacgtaattcatccataatcttaacgcgttccaaagtgtccacatcgctgtggatgtagttgcagcggatgtcattgcgcagcagatattcggtcaattcttctgccatgcgtttggtgagcgtggtcaccagtacacgttcttctttctcgatgcgttgctgtatctcttccatcaggtcatcaatctgattcagactggggcgtacttcaattaccgggtccagcagtccggtaggacggataacctgttcaacgataatgccttcactttccaccaattcataatcggcaggtgtagcactgacataaatcacttgcttggccagttccttgaactcttcaaattttagagggcggttgtcaaaagccgactccatccggaaaccatattccaccaaattggtttttctggcccggtcaccaccatacatggcacgtatttgcggtacgctgacatggctttcgtctattacaatcaggaaatcatccggaaagaagtccagcagacagtaaggacgggtacctgcattacgcccgtcaaagtagcgggaataattttctatgcccgaacagtgccccagttcgcgaatcatctccatatcgtatgtcacgcgctcatagagtcgtttcgcctcatacatttttccttcctcctcgaatttggccacctctttcgtcaagtcgtcctcaatctgatgaatagctctcaactggctctctttggtggtcataaaaagattggccggataaattttgtattcatcaaaagtagccagacggattcccgaaacagggtcgatctcttcaatggcatcaatttcgtcgtcccaaaacataacccggaggagattgtcgctatatgccaggtaaatgtctaccgtgtcaccttttacgcggaaattcccgcgattcagctctatatcgttacgcacatacaggctgtccaccaaacggcgtaaaaatacatttctgtccagcagtttgcctttttttatctcaattacattattatagaaatccgacgggttccccataccgtagatgcaggacacggaagacaccaccaccacgtccttccgtcccgacagcagggcagaggtggcagccagccgcaatttgtcaatctcttcattaatggccagatccttttctatataggtgtcgctggacggcaggtatgcttccggctggtaatagtcataataagatacatagtattccactgcattgttgggaaaaaaactcttgaactctccgtataactgggccgccaatgttttgttatggcttaatatcaaggtgggtttattgatgtttttaattacatttgcaatcgtgaaagtcttgccggacccggtaacccccaataaagtttgtgcggggactccttccagcactccctcggttaactgggcgatagcttccggttggtcgccggtgggttggtattcggaaatcaattcaaaattcataaatagtatgtttagtttaatgagatgtaaaaatacagttatttccttagatattatctattcatctctaaaaaatagactcttgtcgactttttagcatttaaaaacatggaaatattgcattattcggtggaaaggcgtaaatttgcgcaattatttgaataagatgaaaaaatatatcattatagctcttgtctccggtacggttctaacgtcttgtggagagtataacaaagttttaaaaagcacggactacgaatacaagtacgaagcggccaaaagttactttggcaaagggcagaatactaaggcggccaccattctggaggaattgattaccatcatgaagggaacggataaggctgaggaatcactttatatgttgggtatgacctactataatcagggtgacttcatcacagcttcgcattatttcaccacttattataatacttatccgcgtggggtctatacggaacaggccagatatttttcaggaaaagcattgttcttggatactccggaacctcgtttggaccagtcgagcacctataaagctattcaggagttgcagatgtttatggaatatttcccaaccagtggccgtcggcaggatgcacagcaaatgatttttgatttgcaggacaagctggtgatgaaagactatctggctgcgaaattgtattatgatttgggttcttatacaggaaacagtacttatagtactaccggtaacaattatttgtcttgtatcgttacggctcagaatgctttgaaagactatccttataccaagatgcgcgaagatctttctatcttggttttgcgtgctaaatatgatatggcgaaagcgagtgtggaggaaaagaaagaagagcgtatgcgtgagacgatagatgaatattattctttcaagaacgagtttcctgacagcaagtatactaaagaagtggagagcatctacaaggatgccaataagtatgtaaaagaatttaatgaataaaactaaataagaaattatggattacaaaaagacaaacgctccaagtaatactgttacccgtgacatgatggatttatgtgcagacacaggtaacatttatgaaactgttgctatcattggcaaacgcgccaaccagattagtgttgagatgaagaatgatctttcaaagaaattgcaggagtttgcctcatacaacgataacctggaagaagtctttgaaaatagagagcagatcgagatctcacgttattacgaaaagcttccgaaacctacattgatcgctgctcaggaatatgaagaaggcaaggtttatttccgtaatcctgctaaagaaaaagagaaactacagtgatttttcattgggggttgtgcaaaaggtctttaccacagattacacagatcgttctattttgatacatgagtcatttcgtgtggaaactgtatcaatctgagtaatctgtggtacattttgatgcacctcacattatattagccctgttatgctgaacgcagtgaagaatctgataaccattcactttgtgttttcaggtttttcactgcgtttagaatgataggttgtatgattaaaattaaagagactatgatacaacgcattcaatctgtttatttacttgttgttaccatcttgattattatttgcctgtgtagtcccgtaggttcatacataggaagtgattatagtgtttccgctttaacaaatctgtgtcttactatggcggatggtactaaagattatgctccatgggccttgtttgtgattttgctggttgttgcggttcttgctttcggcactatcttcttgtttaaaaaacgcatgttgcaaattcgtctgactattttcagcaccattttgttgatcgggtattatgccacattggtcacttttatttttatgttgaaagaagagtcaatgacattttctctttcatggactgtatgtctgccgttggttgccatcattttgaattggcttgccatccgcgccattggtaaggatgaggtattggttaaagcatacgaccgtttgaggtaagctgagggaatattatgatataaaaagcctgcaagatccatcttgcaggcttttgttgttatgagagagagtggaacgcggactatttgcagaataaaatctttttttttatttagtaatatctatcagataactcagccgtatgcctatgaatgagtgggctgatctttcgaaaaaatctcttttcgaattcttgtaaaagtcgctcaatcccatgtagtaacgtccttccagcaggaaatgtccgataccggtacttacttccagaccggcgcctgctgtgataccataatcgaatttattctctacctctttaccgtgttccggtcttgttgtagaagtagtccagtttatcttttcgttgtcacccaggaaaaagccgatttgtggtcctgcattgaaaaagaccttcactccccggttcaatgcatccttgccgaatgccagatgtgccatgaaagggatttccagataattcatggtacggctgtaagaattgccggaatcgtcttctatcttttcgtcccatccgcgttgtgaatagtttatttccatttgtacgccacacatcatcttgaaatatttctcggacatatatctcatggtaacccccatagacatggtgttcaaggtgttcagtttgattttcgggttgaaactgacggaactcatgttcagaccaccattgatgccgacggcaaaattatgacgttcttcacccaactgtgcagctgccggcaatgcaaagagcaatgtcagtacaagcagcccgaagttcttatacttttccattattcaaaatcaagtttaatcagttcaaagtccttggtaaaatgaacgaagaacactttgcgattgataaatccaccccagttgtttacgcgttcaaatttaaatccggtctggataggggtgacagccaccttgtccagtttgtcttccagtttgttgccgtattgggacaggcccttcaggaagaaatatccagtatcgaatcccagcataccatatttagggaatgagttgagcatatccttgctgtaccatttgcggtaagccgatgagaactgaacggcttccggaaataaattgtttgtgtaaaacgaagaatagaaataggtgtccagttcatagaaactggccagatggtcgttggtataggtctgccattccggatagccgaataactgcatacggtagtcgggattgtcacgggaggtcacaatcagttgtggtaacagttttatcaatgccacgttggtgccggaagtcgggatgaatacattatccatactatggttcatcgcggctttcaatgattccggagtaatattttccccttttaattcggtaaaaggaatgcgtttgttttttaactcctctttcagcccttttataaaatccactttgtctttatcaccatcttctgcatccaggaagataacattggcggttgtaaacttgcgggtaaaatgctcataaacttccgagtataaataagattggggagtatttatctgatagatggcgggattgttgaaaacttcattccctttggaggtaaaaggtactaccagccggatattgtttttcttggcaaattccgcaaccggtttcacctggtcgggataagctgggccgaagataatatccatgctcttcaattcacttctatccagaatgttcttgatggaagaagtattgttatgggtgtcgtatgagtacaggtcgatggatactcctttttccttcaagctgtctactgccatcaggaagccttcatagtattccaccatacgtgtctgttcgtcacggttgcccttaccgtctgtcatgaatggcagcattacggcagctttgatggtagatattttgcgtgcctccttcttgctttcattaaacagctggtcatccgtgggaattacggcaggcgtattattcacaggtgtttcggtctttgtatccttaggatatggaatacaaaggaactttccttttttcagtttttcggtacgcagttcaggattggcggcaatcagttcggcttctgtgatgccatacaggcggctgatgctgaatatggtttccttgcgttccactttatgcatgtccctgcaattgggtttcagtggggtggaagtggtgaccggcttggtagtctgtgcagctttcacctcgttcataattatctcctcgctgtccgtcactttggcgggaattacgataacctgtccgatacggaaattctccgcgctcagcccgggatttgcctggcagatgcgttgtgcggttactccatagcgttgtgtcagcttgtacaaggtttcacccgactggatggtatggaacatctgctgttccgttccgctgttcttttgtggaatcttcaatgtctcaccggttttaattttctggtcactgccggggttcattttaacgatgtcaccggtagtgacattatacatgctggctatggaataaagactttgccctttggtgatggtgtgcaggaaatagccggaagactgtgtttgagccatcattccggtgctgctggcagacaaggctgcgataagatataatgctcgaataaatttcatttgcagtgtgttgattaaactgagtggcaaaagtacaaaaaaaactgttttattcacattatatagaaagaatagaaaatattattaggctttttaattaaatatttcgtcgggaagcattaattttgcaaagattacgcagagtaagaagactatgagtgaagaaaaagaactgattaatgtatacggtgcccgtgtacataacttgaaagatatagatgttgaaattccacggaacagcctgacggtgataaccggattgagcggaagcggtaaatcgtccttggcattcgataccatcttcgccgaagggcagcggagatacattgagaccttttccgcatacgcccgtaatttcctgggagggttggagcggccggatgtggataagattacaggactcagtccggtaatttccatcgaacagaaaacgacaaacaagaatccccgctctaccgtggggactacgacagagatatacgattatctccgtttgctctatgcccgtgcaggagttgcttattcttatctttcgggagagaaaatggtgaaatataccgaggaacagatcatcggcctgattcaccgggattatcagggtaagaagatatttatgcttgccccgttggtacgtacccgcaagggacattacaaagaacttttcgagcaagtgcgcaagaaaggttatctgtatgtccgcgtggacggcgaggtgcgcgagattgtacacggcatgaagctggaccgttataaaaatcatgatatagaagttgtgatagataagttggtcgtatcggaaaaggatgacaaacggctgaaacagagcgttgccactgccatgcagcagggtgaggggctgattatgatttatgacgccgatacccgggaggtgcgccattacagcaagcggttgatgtgtcctgttaccggactgtcttataaagaacctgctcctcataatttttcgtttaactctccgcagggagcttgcccccgttgtaaggggctggggtatgtgaatctgattgatgtggacaaagtgattcccgacaggaatctttccatttacgaaggagccatcgtgcctttgggcaaatataaaaatgccatgattttctggcagatagaggcgttgcttgaaaaatatgattttacgatcaagacgccggtcaaggatatgccggatgatgcgatagacgaaatactctatggctcggatgagcgtatcaagataaagagcaccttgattcatacctcttccgattactttgtaacttatgaagggattgtgaagtacatccagatgatgcaggagaaagatgcgtcggccactgctcagaagtgggcggaacagtttgccaagaccgatgtttgtcccgaatgcaagggcgcgcgtctgaacaaggaggcgttgcatttccgtatccatgacaagaacatttatgaactggcaagcatggatattaacgaactgtatgactggttgcaacaggtcgattcttttttggaagacaagcagcgcatgattgccgccgagattttgaaggagatccgtacccgtcttaagtttttgttggatgtgggactggattatctttcactgaaccgcacctcggtatccctttcgggaggcgagagccagcgcatccgtctggcaactcaaatcggctcccagctggtgaacgtgctttatattctggatgaaccgagtatcggattacaccaacgggacaacctccgccttatcaactctttgaagaagttgcgtgacacaggtaactctgtcatcgtggtggagcatgacaaggatatgatgctggcggcagactatgtggttgatatgggaccgaaggcgggccgcctgggaggcgaggtagtgtttcaggggactccgaaacaaatgcttcagacaggaacgcttacctctaagtatttaaacggacagatgaagatagagataccggccgaacgccgccccggtaacgggaaatccttatggctgagaggggcgaaggggaacaacctgaagaatgtggatgtggaatttcctttgggaaaactcatttgtgtcacaggggtgtccggcagtggtaaatccacgctgataaacgataccttgcagcccatcctgtcacagcatttctaccgttctttgcaggaacctctgccctatgacagtgtggagggactggactatatagataaggtggtgaatgtggaccagtcgccgctgggtaggacaccgcgttccaatccggccacctatacaggggtattctcggatatccggaatctgtttgtcggtctgcccgaagcgaagatccgtggctataagccggggcgtttctcgttcaatgtaaccggaggacgctgcgaggcttgcggtggtaacggatacaagaccatcgaaatgaatttcctgcccgatgtgctagtgccttgcgaggtttgtcacggcaaacgatacaaccgcgagacgctggaagtgcgctataagggtaaatccatagccgatgtactggacatgaccatcaatcgtgctgtagagttctttgagaatgtgcctcagattctgaataaaatcaaagtgctgcaagaggtggggttgggatatattaaactgggacagccctccaccaccttgtcgggcggagagagccagcgtgtgaaactggctacggaattgtccaagcgtgataccggaaaaacgatgtatattctggatgagcctactaccgggcttcatttcgaagatatccgtgtgctgatgaatgtactgaacaaactggtggaaaaaggcaataccgttctggttatcgaacataacctggacgttatcaaactggcggattacatcatcgatatgggtcccgaaggcggacggggcggaggacaggtacttgcggccggaactcccgaggaagtggccgaaagcaaaaaaggatataccccgaagtttataaaagaagaattggaaaattaaccggcataccagcaatgaaagagaagatagctaaaaccaacgtagcccgtctgcttgataaagccaagatagcatacgagctcattccataccaagtagacgagaatgacctcagcgccgttcacgttgccgccagtttgggcgagaacatagaacaagtcttcaagactttggtgcttcatggggataaatccggatattttgtctgtgtcatacccggcgagcacgaggtagatttaaaaatggcggcaaaagtctcaggtaacaagaaatgcgacctgatccccatgaaagagttgcttcccctgacaggatatatccggggaggatgttctcccatcggcatgaaaaaacatttccccacctatatacacgagacttgcatcacatttccatttatttatatcagtgccggtatccgcggattacagataaaaatagctcccgatgacctgataaaagaaacgaaagcagagatttgttcccttttcaccgaataaatatgccaaaaagagtcacatttgtggctctttttttttcagatagactaaaagttatatctttgcaaaaaaagaatactaactattaattaaatctttatcaactatgtttgaaggacagcctaaaggcttatacgcattagctctcgccaataccggcgaacgctttggttattacaccatgcttgctattttcactctcttcttgcaagcgaaattcggctttacagccgccacgacgtcaacaatctttgccagtttcctggcaggagtgtatttcatgccgctgatcggaggtattctggctgataaattcggttatggcaagatggttactaccggtatcgttatcatgtttgccggttatgtcttgctggctatcccgatggcaactaatatcggattgtattccatgttcggcgctcttgccctgattgctttgggaaccggacttttcaagggaaatctgcaagtaatggtaggtaatctgtatgatgctcccgagtatagtgcgaaacgtgataccgctttcagtttgttctatatggcaatcaacatcggcgccctgttcgctccgactgccgctactgccatgaccaactatgtgttgggcaaagcaggtttcagctatgtaccccagataccttctttggcacaccagttccttgacggtacgataacggctgaaggtgaggccacactgactgccatgcagagcgcacagaatttcacaggaagtatggccgatttctgtactacctatattgataaattgtctgaagcctataattatggtttcggtgtagcttgtatctcactggttgcctctatggctatttatgttattttccgttctacattcaaacatgccgattacaactccaagcaggctaaaccggccaatgtacacgaagaagagctgactcccgcacagaccaaagaacgcatcgtcgctttgttgctggtattcgctgtggttattttcttctggatggcattccatcagaacggtcttaccatgaccttcttcgcccgtgactacacggcacatgaggtaaccggtctggatcgccttggcttcagcgtatggaatctggctctgcttattgtaaccgtttatgcaggtttctcactgttccagtccaagacaggcaagggcaaattgatttcaggcgttattgctaccttggctcttgtggttttaggagtcaattatggtactatggaccctacattgcctattcttcctcagattttccaacagtttaatcccttcttcgtagtagctctgactccggtatcactggctgtattcggttcgttggcaaagaaaggaaaagaaccatcagctccgcgtaaaatcggtatcggtatggtgattgccgcagtaggtttcatgctgttggcgtttggctcattcggtctgcctactcctgcagaagtagaagcgaacggtattgccgaaagtgcattggtctcacccaactggctgatttcaacttatctggtattgacttttgctgaattgttcctgtcaccgatgggtatctcgtttgtttccaaagtagctcctcccaagtataaaggtgctatgatgggactttggttcgtagctactgctatcggtaactatttggtggctatcatcggttatttgtggggtgatatgcagttgtggatggtatggagtgtattgattgtatgctgtttgctttctgcattgtttattttctctatcatgaagaaattggaaaaggttgcgaaataattcatgccttatatagattaaaaaaggaagcccgcttgatttgcaagcgggcttcctttttttgtaatttagcgcgaatcctcaggcttacgttaaattacagaaaaaagatacgaaaacaggaacgctcatgtcaatcagtattccgtggaatatggctaagggaatcatgtcttttcccgaatagcgtgtgatggatggcagcaatacatccatcgagttcactccggcagccgagataggggccagctgtccaaagtatttccgtatgagcggagcgccgagtaaggccatcatttcccggaaaatattggccagtaatgcaatggttcccaattcggtggccagttgtaacccgatagacggttccttgaactgtgtgatcaggatggaggaaagcgaataataggcaaagccgctacccaccgccatacagtcgaatacactccattggcttaatagcaggctggcaagtgccgagaaaagcaaggttcccgtaatggtagctatcggcaccaggagcattttcaaccgtaagcttttaatcagttctttcaatttcttattgctgcctatgctgattcctacttgtaacatcagtgcataaagcacatacatggaaacagagtgcatgtcatattggaaattattgacagctccaatcatacatcctgcacaaaaaaatgcgacaacaaccaaactacctttcattgtttgcctcctttcttaaaaaacagatgaaataccaggaaggaagctagcatactgcccaaaatgcttaatgtagccaatatagccgcctgccatccgaatctacctaaattgttaatgattaagctgttggaaccgatagagattcccaaaacaaacagtagcaggaagatagtgagcgaggtactcttttctatcttttgtaaaaactgtaagttgcgcaatacatatcctataccgataccaacaaacatgatagatataatagtaaacatagcaatcatttttttagtaaaacatatacaactcgatgctctcaccgaatgagaaccatcatgcaatatatctttcatcgggcacgtgtgtgggtaggatgaaagtttggtaataaattacgtgtgagtggaaatctaaacaaatccgctgaaccaatgtacatgcacaatgaaatgattacacaggggggtatttcccgatgtaaggtgatgtatgctgtatgtagtttgtaattggttcatatcaatcgttcatttgcggtgcaaagataagtcttttgtgcatattttcaaaataaatattcataaatcttcttctgttacctctatccgaatacatcgtgtcttttaatataggatcatttattgggaatttatctccgaattctggcgataaaaaatattcattaattgcaggggagaagaactttatcttttcttgagaattatacttttttattgaattgaatatgctgtgtaagtgtttgtatactagttgtttatatttgtttgagataaaaatgaagataatgtcataattggtggcaattatctatacaccctattgatattttttgtttctttgtaatctatttatatactaacacaccaaaggaatggattacaccgaacagtttatccggctgaattgcagcttgatgtcagattacaaaatgatgaagctgaatgccgaaatgaaatgcatgggaataggattatatattcaaatgatattgttcctgcgaaggcaacaggaatacaaacacgattttaacgagttggatttgttggctgaacaatggggggctacagtggaaaatttgcagcatctcattaaagactttaacttgttcgtcataacggaggacggatatttccgatgcctgtatctggatgaggtgatgggttatcagaataagctttcggagcaacgtgcagccgccggtagcaaaggcggaagaagcagcaagaaaaagactgcgcaaatagctgaaaaagtaatcacttctactgtgctggtggcagcagataaagaagcggatgacgaagcaaacaataaggaaaacggtgcaaaatgcatgaaaaatacgattgaaaaaagtgatgatgaaaatatagccgaaaatacgattcaatatattgataatgaatgtgttgatgagtgttcgcaagcaagcgttaagcaaaactttataagagaagaaaagaatagagaagagaagaaaaacaacaataacaaagaaaaagaaagaattgctgttgttgctgaacttttcagaaacatagaatttacacctcggtggaaacgctatatcaatgaggctttccctgtccggactcaggcggctacagcgcgtatgatgtcggttctggaagaaaggggaattggaccacccaagaaaaactacgcgtcacatggattgctgagagttattgaccactaagtatccgccgttaactacggagaacagatatagatcttacacgtgcaagatgctatatcttacagctgtaagattatatatctttcgccttcatcgtctggatgttgcagatggattcagccgggctgtcggtggcggaatataaccgcctgcccttgttttcacgagtatcgtttgggatatctcaaaaaaatgctcagcagagcaaatactccgatagctaccggataatacaagtattcgatgatgctcagaggagaaagggaagccagcttggcggcaatcagcatttgcgctccgtaagggatgatgccctggatgacacacgagaaagtatccaggatacttgcactcttgcgtttgtccaccctgtaacgggtagcgatgtcgttggccaatggtcccactgtgatgatggctatcgtattgttggctgtacagaaattggcgatgctcaccaaagctgcgatgcaaagttcggctccgcgtttgctgttgacgtgtttggtcagtttttggataatatagtccactccgccgttaaagcggatcagttccagcataccgcctgccatcagggtgatgatgataagttcgcccattccggtgattcctgtgcccatggagccaagccagtcgaacaggctgatactgcctgtgagcaggccgatcactcccgttgtggcgatgcccagtatcagtacgagtgctacattcatccctgctatggcggttcccagcacaaccagataggggaggactttgatccattccaccgactggatgtcatgggtggtcatcacgtccattcccctgaagatgtagtagccgaaaaccatcagggcggccggaagggctatcatgaagttcacccggaacttgtcacgcatggcgcatccttgggtgcgggtggcggcgatagtagtatccgaaatgaacgaaaggttgtcgccgaagaaggctcctcccaccacgatacccgccatgaaggccaggttcatatcggttttatccgcaatgcctgctaccacggggactaatgccacgatggttcctaccgaggttccgatggagagcgagatgaaacaggcggccaggaagatgcctgccagcagcagatgatccggcagcagaagaagcgtaagattcacggttgcatcaatggccccgatatctttggcgctttgggcgaatgcgcctgccaggatgaaaatccagatcatcagcatgatattcttgttggctgcgccgatggaatattgcagcatgcgctcgttcaggctcagtcctttggtgatgcatactgcataaaccgaagatgccatgaaagcaaccgtgatggggattttataaaaatcatctacgatgatagatgtcaccagatacaggcatagaaataccagtaatggactgagtgcccataagctgggtttatttgttattggggttaatttttcaccgttcatgaatttgtattttataaaatgaggtgcaaagttacaaaaagacttgttttataacaatatatgcgagaaaaaggtcacagccccaccttcgtaataagaaaggcagggctgtaagggtattgggaaagttgagtataagattggattatagtgtcacgcctgtcttgaagatagcgatttcacgataattcttcttctcattatttaccggttctccgctggcaacccggatgatatagtctataaaacgctcgcaagtcttttccatcggttcgttttctacgatgactccggcattgaaatcaatccatcccggtttgtttttagccagagtggagttggtggagatcttcatggtgggaacaaacgtaccgaacggagtaccgcggccggtagtgaagagcaccatgtgacaaccgcaagaggcgagggcggtagccgctaccaaatcattacccggtgcggaaagcaagttcaaacctttcactttcaggcggtcaccatagcccataacgccgtcaacgtatgccttgccgcatttctgggtacatcccagcgctttgtcttccaaggtggagataccacctgccttgttgcctggtgacggattttcgcccacaggttcgccgtgtgacaggaaatattccttaaaatcattaatcagatgtacggtctgttcgaacaactccttagtgcggcagcggttcatcaggatcgtttccgcaccaaacatttcgggaacctctgtcagtaccgaagtaccaccctgagcaatcaggaagtcagagaacatgcccagcaacggattggcggtgatccctgagaaaccgtccgaaccaccgcatttcaaacctacacgtaattcagacagaggaacgtcctcgcgtacatcggctttggccttggcatacagctcacgcagaatcttcatgccttcttcaaattcatcccccactttttgagttaccataaatttcacgcggtctgtgtcataatcacccaaaaactcgcggaaaacatccggctggttgttctcgcaacccagactgacaatcagtacggctcctgcattgggatgcagaatcatgtcgcggagaattttcttggtattctcgtggtcatcacccaactgcgaacagccatagttgtgaggaaaagccatgatggcgtccacgccttcaccgttggtttcgcggcgtaacgcttcggccagttggccgatgatgccatttacacaacccacggtagggataatccatacctcgttacggatccccacatcaccgttcttgcggcggtatcctttgaacgtcaggtctttcttcgggatattgaggtctacgctgaccggattgtaggtataatccaacagaccggcaagattagtctttatctgattttcgttaatccagtgtccttgttccacggcggtcagggcatggccgatggggtagccatacttgatgatgttctcgccctgggcgaaatctttcagtgtcaccttatggccggcgggcacgtcttctttcaaagtgatgacatgaccatctaccgtgatggtttcgcctgcttttaaatccgagatagccaccactacgttatcagccggattaattttcaaatactttgtttccatttctatttttagttattagatttactttttatgtgcgtccagatagaaatccacattctccaccgcaagcagggtgataggcatatagttacattgcttcacctcttttttgaatatcaggtggttgcacaggctctctacgccgctgtatccttgtgcggtaggttgctgcgcgatcaggaaatctacagcaccctctttcagacaagagacgttccggcgtaacaaatcgtacccaatcagtttgaaatttttcatattgtgtccgatgagatattcgcctacaatgtatactttcgagttgaacgtgatgccgcacgtaatctgtgggttctcctggaagaagcggttcatcagtgcctcgtcctcgtccgggcgcttggcatagagattcagttccactatcttgcagtcgggaaaatgctcctgcatatattttctgaatcctttttcacggttttcctgctggtttgatcccaggcgtccttcgttgatttgtctgaagataacaatttccttgggacattctcccagcatcatggccatgcgggcggcaaagtatccgctttgatcggatttctgcccgaagaatgccagtgggttcagactgtccacattggagtctataaatatataaggtatttcccgttcttgtaatttgtcggtaaatctggccgtcatttcaggaatagtgggggcaagcaatacgccgtccggctcttttctcagtatgtcctcaccggcgttgatgaaggaggaatattcatattggtcatagtacaccacggacagggtgatgtggaaatcagaaaaagtctctacggctcttttcatccccatctccacatcggtccagtaatcgccttccttgtgctgtggcagcaggcagacgaacagatactttttgttggacgccaaagcgctggcatacatattgggctgatagtccagttgcttcaatatttcttccacccgtttccggctggcttcggatactcctgtgcggccatgcaatacacggtccactgtgccgactgatacatctgccaggcgggcgatatccttaattctgattctttcgggcagtttattcataccttattatatatattgtgctcgtacacactaataatttattttttttcgacacaaatatataacaatttttggttttaaaaaaataaatagtacctttgtgcacgcacacgaatgaattatttgagtgctccgttgagtacaaggttatgatgtgattcgtctataagtgtgtaaaccagtaatttaattggattagaagttaaacgaataaatatataacaatttaaaatcacgaaattatgggaaaagtagtaaccttaggtgaaattatgttgagattgtcaactccgggaaacacacgttttgtacagtcggattcatttgatgttgtttatggcggtggtgaagcgaacgtagcggtgagctgcgcgaactacggtcacgaagcttatttcgtaaccaaattgccgaaacacgaaataggacagtctgctgtgaatgcattgcgtaaatatggtgtgaagaccgatttcatcagtcgtggtggcgaccgcgtaggtatctattatctggaaacaggagcttccatgcgtcctagcaaagtaatttatgaccgtgcccactcggctatcgccgaagccgatccttgcgatttcgattttgatgctatcatggaaggtgcggactggttccattggtcaggtatcactccggctatttctgacaaggctgctgaactgaccaagctggcttgtgaagctgcaaaacgtcatggtgttactgtgtctgtagacttgaatttccgcaagaaactgtggacaaaagaaaaagcacagtctatcatgaaaccgttgatgcagtatgtagatgtatgtataggtaacgaagaagatgctgaactttgtctgggattcaaaccggaagcgaatgtggaagccggtgaaaccaatgcggaaggttacaaaggaatctttaaggctatggcaaaggaattcggctttaaatatgtagtgtctaccttgcgtgaatcattctcggctactcacaacggttggaaggctatgatttacaacggagaagaattttatgaatcaaaacgctatgacatcaacccgattattgaccgtgtaggtggtggcgactcattctccggaggtatcattcatggtctgctgactaaaccgaatcaaggtgccgcccttgaattcgctgttgccgcttctgctttgaagcatactatcaacggtgacttcaatttggtatctgtagacgaagtggaagcattggccggtggcgatgccagcggacgtgtacaacgctaaatttgttttttataaggaacatgaatgacgcaaataacgcaaatttttgatacatgttttatttgtatcatttgtgttccaatctttcatttaaactaaaatatgaaattatggctcgttttgataaaatagcagtgttgaacaagattggttcaaccggaatggttcctgtgttctaccataaagatgcagaagtggcaaagaaagtggtgaaagcttgttatgatggcggagttcgtgcatttgaatttacaaaccgtggtgactttgctcatgaagtattcgcggaagttgtgaaatacgcggcaaaggaatgtcctgaaatggctatgggagtaggttctatcgttgatcctgctactgctgctctttacttgcagctaggcgcttgctttgtagtaggtccgttgtttaatccagaaatcgctaaagtgtgcaaccgtcgtttggtggcttatactccgggatgcggaagcgtgtccgaggtgggtttcgctcaggaagtaggttgtgatctttgcaaaatattcccgggtgatgtattgggagcaaaattggttaaaggtttgctggctccgatgccttggtctaaactgatggtgaccggtggtgtggaaccgactcaggaaaatctgacttcttggattaaggcaggtgtgttctgtgtaggtatgggttctaaattgttccctggcgacaaggtagccgcagaagactgggcgtatgtaactgcaaagtgtaaagaggcattaggctacattgcagaagcccgcgcaaataaataagaaaaagatcagctcatgcccgcaaggggttagtgaattagggcgtgagtatcattttgtttaaaggtgtatataaaatgggtaagggccatcgcgaagtgtattcgcggtggcttttcactttccggcgtgtgcttgaagcgggatggtggtaaaaatattcttgtaaagattggtagatagaataaaaatttgttcttttgcaccatttcttaaaaaaataaaatgaagcgtttaatctaaaacacacaaaaatgaaaaaagcattattaaaggtgaccgtcatgttgttatgtttggcgggggtaactcctgcaatggcccagtttaatttgaagaaggcagtggggggagccgtaaaggctgcaaaggcggtgactttgaccgatgagcagatgacagagtatgtaaaggagtacattgactggatggataagcataatcaggtttgtgcggacgatgatccgtatactgtccgtttgaaaaaactgactgaagggttgaccgaagtggaagggatgccgctgaatttcaaagtatattatgtgattgatgtaaacgcgtttgcttgtgccgacggcagcgtgcgtgtgttttcttcactgatggatatcatgacagatgaagagttgttgggagtaataggccatgaggtaggtcatgtggcacacaaagactcaaagaacggtttccgtaccgcattgctgacatcggcattgaaagatggtatttcatcacaaggaggaaaagcggctgccctgacagattcccagttgggtgacttgggagaggcattggtcaatgctacttattcacaaaaacaggaacgcgccgccgatgattatggttacgagtttctgaagaaagcaggtaagaatccttgggcgatggcattatcattccagaaattgaaaaaattgcaagaagaggcaggagcacagaaaagcagcaagctgaatcagttgttctctactcatcccgatcttgacgcacgtatccagcgtatggaggaacgtgctacaagcgaaggtattgagaaacctgcaaacacgatggaggaaacagcgaaataaatggtttccggcaatgtaggttatacacataatagagggtgtccatttcaatggtggacaccctcttcttttttgggagatttttttgcatgaccttatcttgcctcccggcgggataaaatctgaatttattatgagagaaatccttattgggagaaaatcaaagtccaaagttcaggttaaaagaatcaagtgttctttttcgtctagattatagaaggaaatctcttggtacaaagatacgcttattttaatggttgccgaattccctgtagggttatatcatagctagatttcctaaaatgatggcaaaaattccttttttctttctgatactttgccttctctttacattgtgctatatgctatgtgttgtaaatcagaaggttaatagtgtatattgtttctagactatgcaaaaatagggtggcttaatataagtgaaaatcactatctttgtataaaccagcagaaagaaatgcacaaaacagtttagccatgatgaattacgcatacgatacatctttgcaggaaacgatgatactgactgaagcgtttcacacagacagggtcatctgtgacaatggtagtctgtataagtttatatgggtccaggaaggcaaactgacattgatagtagaccatgtggaaatagagatgaagcaggatgaaatcatctctgtgagtaatcttcaccgcacggagttcaagaatgtatcgggcaggtatcttgctcttcttttcaacgagaatttttacggcatttacaagcatgagaaagaagtgtcgtgcagcggagtgctgtttagcggaacttccggtatagtgcatctgcggctcccgataaccgactccgaactgttgcacgaggtggtggacagaatggttaccgaatacattctgcgggataacctgcagggagaaatgctccgcctgctgctgaaacgtttcatcattctgtgtacccggctggcccgtaagcagttgtccggctttccggttaatgaaaaaggttttgacatcatccagcgttattatgtgttggtggacaatcatttcaaggagaaaaagcaggtacaggcatatgctgctttgttgcatcgttctcccaagacgctttccaatttatttgccgcatacggtatgccttcccctttgaagattatacaagaacgagtggtgaccgaagcgaaacggctgttgctgcatacctcgcatagcatcaaagaaatatcggtgattttgggctttgaaagtgtgggtactttcagccgcttctttaagaatatgacgggggaaaatacctcggcataccggaaaagattgcaataaataagaaccggttcttattgctattaattttgataaaaacagggactttttccatgttttatgtagttattctgaaacagtatccgttatctgattaaaaaaacaagcatcaaaactttctatctatctaattttcttgtaaatttgcaccttaatttttggaaggtattgccttttagttagagaatacaagaaaacgatataaaattatgagtaagaaatttgctgaacactcgcaactcaacctatcacaggtcaataaagatgtgctgaagaagtgggatgaaaacgatgttttcgccaagagtatgacagaacgtgaaggatgtccttctttcgtgttttacgaaggacctccctcggctaatggtatgccgggtattcaccacgtgatggcacgtaccattaaagatactttctgccgctataaaaccatgaaagggttccaggtaaaacgcaaggccggatgggatactcacggactgcctgtggaactgggtgtggagaaagcattgcatatcaccaaggaggatatcggaaataccatttctgttgccgagtacaacgcggcttgccgtaaggacgtgatgaagtttaccaaagagtggacagaccttactcataagatgggttactgggtggacttggagaatccatacatcacttatgacaaccgctatattgaaacgttgtggtggcttttgaagcagctttataacaaaggtctgctgtataaaggctacaccatccagccttactctccggctgccggaacaggattgagctcgcacgagttgaaccagccgggctgttaccgtgatgtgaaagacatcactgtggtaggacagttcaagatgaagaatccgaaacccgagatggcggaatggggaactccttattttctggcgtggacaactactccgtggacattgccttcgaatacggcattgtgcgtaggaccgaaaatagactatgtggccgtgcagacttacaacggatataccggagaaaagatgactgtagtattggcaaaagccttgctctatactcactttaacaagaaagcggaagaacttgccttggaagactataagccgggtgacaaactgattccgttcaaagtagtgggtgaatataaaggaccggatctggtaggcatggaatacgaacagcttattccttgggtgaaaccggtgacggtagatgaaaacggaaaatggcaagaagcggccggtcaggcattccgtgtcattctcggtgactatgtaactaccgaagatggtacgggtatcgtacatatcgctccgacattcggtgcggacgatgcttttgtagcacgtgcggcaggtattccttctctgttcatgataaacaagaagggtgaaacccgtcctatggtggatctgactggtaaattctatctgttggacgaactggacgagactttcgtaaaggaatgtgtggacgtagagaaatataaggaatatcagggtcggtgggtgaagaatgcttacgatcctcagtttactgtagatggcaagtacgatgaaaaagctgccgctgccgccgaatcactcgatatctatatctgtatgatgatgaaagccggcaacaaggcgttcaagatagaaaagcatgtgcacaattatccgcactgctggcgtactgacaaaccggtgctctactatccgctggacagttggttcatccgatctaccgcagccaaagagcgcatgatggaactgaacaagactatcaactggaaaccggaatctaccgggacaggccgtttcggcaagtggttggaaaacttgaatgactggaatttgagccgttctcgttattgggggactccgctgcctatctggcgcagtgaagagggagaagagctttgtatcggttctgtagaggaattgtataatgaaatagaaaaatcaatagctgccggatttatgaccgccaatccttataaggaaaaaggttttgttccgggcgaatataacggggagaactatgataagatagaccttcaccgtccgtatgtggatgatatcatcttggtgtctgaaagcggcaagccgatgaaacgtgaggccgacttgattgatgtgtggttcgactccggtgcgatgccttatgcgcagttgcactatccgttcgaaaataaggaaattgtggacaaccgtacttattatcctgcggatttcattgcagaaggggtggatcagacccgtggctggttctttacgctacatgctatcgctacgatggtattcgacagtgtggcttacaagaacgtaatctctaatggcttggttttggataagaacggaaacaaaatgtcaaaacgtctgggcaatgcggtggatccgttcggcgctatcgaacagtatggctccgatcctttgcgttggtacatgattaccaattcttctccgtgggataacttgaaatttgataccgatggggtggatgaggttcgtcgtaaattcttcggtaccttatataatacctattcgttctttgcactttatgccaatgtggatggtttcgcttatcaggaagcagaagtgccggtaaatgaacgtcccgagatagaccgttggattctgtctgttctgaattcattggtgaagaacgtggacgcttgttacaacgattacgaaccgaccaaggcaggacgtctgattacagacttcgtaaatgataatttgagtaactggtacgtgcgcttgaaccgtaaacgtttctggggtaatgctatgtcacaggataagctgtccgcttatcagacattgtatacttgtcttgaaacagtggctaggctgatggcacctgtcgctccgttctatgccgaccgtttgtatacagatttgattgccgttacaggtcgtgacaccgtggtttctgtacacttggccaagttcccggaatgtaatgaggcattgatagacggagaactggaagcgcgtatgcagatggctcaggatgttacttctatggtattggcattgcgccgtaaagtcaatatcaaagtgcgccagccgttgcagtgtatcatggttccggtggtggacgaagagcagaaaatgcacatcgaagccgtaaaagacttgattatgaacgaagtgaatgtgaaagaaatcaagtttgtagacggagctgcaggcgtattggtgaaaaaggtgaaatgtgactttaaaaaactgggtccgaaattcggcaaacagatgaaagctgttgccgcagccgtagccggaatgtcgcaagaagctattgccgaattggagaaaaatggtaaatatacctttatgcttgatggtgcggaaacggttatcgaaacaacggatgtggagatcttcagtgaggatattccgggatggctggttgccaatgaaggcaaactgactgtggctttggaggttaccgtaactgaagaactgcgtcgtgagggggttgcccgtgagttggtaaaccgtatacagaatatccgtaagaatagtggttttgagataacagacaaaataaaagtggcattatctaaaaatcctcaaaccgatgatgcggtaaatgaatataatacttatatttgtaaccaagttcttgctaactccttggaattagtggatgaagtgaagaacggtacagaattaaattttgatgatttctcactttatgtgagtgtcgtaaaagaataattaaccttttaaaactaagttatatggctgaaaaaactagatattcagatgcggaacttgaggaattccgtgctattatcatggaaaaactggaattggctcagcgcgactatgatagactgaaaagtagtatcatgaataaggacggtaatgatacggacgatacttcccctacttataaagttttggaagaaggtgctaatacattgtctaaagaagaaacaacccggttggcggcacgtcagctgaagtttatccaaggattgcaggcggcactgatacgtatcgaaaataaaacttatggtatttgccgtgaaaccggtaagttgattccgaaggaaaggcttcgtgcagtacctcatgcaacactgagcattgaggcaaagaacgaaggaaagaaataaaatagtggttaatggttagtgattaatagttaatgagtttcactgtcatgttacagtattaaccgctaatcattaaccattaattaattttcaatttaataaatgaagaaactattcaccaaggggcagctctctgttcttattgtctttggaattctgattatcgaccagataataaagatattggtaaagaccaatatgtactggcatgagagtatccgcataacagattggttttatatctattttacagaaaataacggcatggctttcggtatggaaatatttggaaagttattccttactaccttccgtattgtagctgtgggattgattatctggtatctggcaaaaatcgtgaaacagaattataagactggttatattgtatgtatctctttaattttggcaggggctatcggtaatattatagacagtgtgttctatggagttatttttaatgaaagtactcatagtaccatcgcttcttttgttccggtaggtgaagggtattcggaatggttacatggtaaagtggtggatatgttctattttcccattattgaaaccaactggcccgaatggataccgggaataggaggggaacatttcatatttttcagtccgatatttaattttgccgatgccgccatcagttgcggtattgtggcgttgttgttattttacggtaaatatctgaataagaatattcacccgtcagcagaagaaattaaagaataaatgatgcgtcgcaagaatattacttgggtgtggctgctgggtgcggcttttatggtggggtgtggtaagcaagtgcctgaaaatattatccagccggacaggatggagaatatcttgtacgattatcatttaagtatctccatgggcaataatctgagttattctgataattatcaaaaggaagcatataagaactatgttttcgagaagcatcatattactgaagctgaattcgattcgtccatggtgtggtacacacgtcacacagaggaacttgccagcctctataaaaagctgggggaacgcttccgcagtgaaaaaaaacacatgcaggagttactggcattgcgtgagaataaaccggctgtatcgttgccgggagatactgtggatgtatggtatgaccgtaaactttattggctgacagatgttccgttggcgaataaggtgacttttgagattcccgctgatagtaatttcaaagcaaaggatgctttcctgtggtcggctgattatatattcctttcggaaggagaacggagagccactatgggggtcaatattttgtttgataatgattctgtggtgggacgtgtgaaagatatcacgtgttctggtgtgcagaccttgtatataaagcctgattctgcttttgccatcaagagtgtgaacggatttatttactatatggatagtgattcgtcaacgaataagccgggactgattatcaataatattactttgacccgttatcatgaaccggtagatacaatgacagttgccggaaaggatagtttggctgtggaacggcgtgttggaacagattcgatggtaacagagaaaaaagcagattcgattcaatcggtggatatcaggaaaaatgttcccgtccgtatgaatccacgtgagatgaaggagaataatgcggcagatcattctcactcagatcgtcctcagagaatcaagcgcagaaattaattattttttgtgggtatgagacgttttgcttgtcattatctttatgtttcggcagatggctgttattctaaatatgtagtggagttggaagatagcgatagagtgcgtgcatattttccattgaaggaggagattagtgcgacacaatggataggcggagtgattattatttctccgatgtatgagttggatatttgttccggagagaaatttgttgatttcctgcaccgtgccatgctggaaacagaacttgagcaacctgtatatgcatggcatatagctgattttgatttgccgggaaaggagtttacagcaggaagcagactggtacgcttataatgtatgctttgggtagagctgtagtatttctcattcagaaattattggatatgccgatggaaatatgaattttaaggtaataaacgtcttctgaactccgagcaaaccactgctgtggcaattgccacattcaatgattcggaggtttcccgttcttgaggataattgggaatgtataacttcttgtttatcagcttctctacttcaggacttactccttttccttcgtttcccatgacaatcaatccatgagccgatagggattctgcataaataatgttcccgcttaaaaaagtgccgtatacaggaatatcggccaggctttcaataagctgtggtaaagaacagtaatgaacttttactctagccaatgcccccatggttgcctgtacggttttgggattatacacatctgctgtccctgccgagcagaagatatgctcaatgccaaaccagtctgccaagcggataatggttcccagatttccgggatcttgtacatcgtccaacgccaggcatagagaacttttaataacttccggatttaaatcataagaaggttgtacaaaaacggccaatacctcttggggggtcttttgaaggctggcacgtgacaactcttcttgtgttacttcaataatttcgttggccgtgacagggtggtttattttcagccaattggaagtggcaatcagtaacttgcaggggaagtagcctaataaatcgcctaccaatttatgtccttcggccacaaaaacttgttcttctttgcgtttttttttcagttccaacgaacggatatattttattttgtttttgctcagcatgataatttctatttaataacaaatatttggagcaaagctaagaagatattttcaattaatatctatctttgtagataaatttgcgaaggttacggatttgtatgaagaaaagcgcacgcccatatatatgcacatttattatagcactatgcacctcgtgttcggtcagtaaatttattcctgaggataaatatttattggatgaggtcaggattgtatctgagacgaaagaggtgaagccgtcactattcaattcatatattcgtcagaatcctaatgccaaatggtttaatttggttaagatacctatgcgcacttattgcgtctcaggcgtggactccactaaatggattaatcgtttttttaggaagattggtgatgctccggtaatctatgatgaatctgttgccctgaaatcccaggaggaaatagagaaagcggtacgtaatatggggtatatgggggctactgtgcacttggataaaaaaacgaagaagaacaaattaaaattggcttaccgtattcatgccgggcatccttatagggtacgtcatgtggtgtatgatatagatgatttggttatcagtaactacatgcggcaggactctgcccaaagtttgttggcgcccggtatgttgtttgatgtgaatgtgctggatactgaacggcagcggattaccaaattattgcaaaataaggggtattataagttcaacaaggattttttggtctatcaggcggatacggctagaaatacctattgggtggatttgactctacgattacttccttatcagcgtagaaaagaagatttgccgcggaagcatagacaatacaaggtgggggaggtgaactttctggcggatgatgaaatcatgtcggtgcaggaaggaactttggaagaatttgactctttgcgatacaaaggatatagtatgtattacaagggaaaggcttttctccgtccgcaagtgttggttgatttcaatcgtatccgtccgggagaactgtatagtgaacaggatgtgcaaaacacctattccaatctggggcgtttgcgtgccttgaaatactctaatattcgttttcgtgaagtgaatggagaaaatggtacgcaactggacgcgtacgtatttttggcaaagaacaaaaataaatccatggcgtttgaagtagaaggaactaattcggctggtgacttgggagcggctgcctcggtttcttttcagcaccgcaatgtattcaaaggttccgaaacttttatgatgaaagtacgtggcgcttatgaggccattacgggattgggggtggcttcacaggattatgtgaatgataattacatggagtatgggatagaaagcagcttgaatttccctcagttcatgtttccttttctatcatcgaattttaaaaagaaaattagagctacttcagaggtcggcttaaagttcacatcgcaagttcgtccggaattctcgcgtacactggcttctgcttcatggagttataaatggactgacaggaaacgtatgcaacaccgtttggatttggtagatgtcaattatgtatatatgcctagaaagtcatcggcttttcaggaatatttggacagcatgagtctgaggaattcagctttgaaagccagttatgaaaatcagcttgttgtgcgtacagggtacagctttacctataacagtgcaggaaacgccatgatgcgtacacctactaaaaattcctattctattcgtgccaatattgaagaggctggtaatttactatatgttgcttccaaattggttcaccctaatccgaaagatggagaagattatgtgctggcaaatattccttttgctcaatatgtgaaagcagattttgattttgcaaagaatttcatgatagatccgcgtaactcatttgtgtttcatataggagtgggggtggcctatccgtatggtaactccaaaatgcttccttttgaaaagagatatttttccggtggcgcgaacagtgtacgtgggtggtctgtgcgttctttggggcctggtgtttataaaggtagtgaggatgggagaatggactttatcaatcaggctggtgatattaaattggacttgaatatagaatatcgtactcatttgttttggaaattgaatggagcggcttttgtggatgccggtaatatctggactattcgtgatgactccggacaggaaggtggtttattcaaatttaacgagttttataaacagatagctgtagcatacggtttgggaatccgttttgatctggattatttgattttgcgttttgatggtggcatgaaggccataaatcctgtggaaacaggtaaaaaacgatatcctgttatccgaccgcgctttagccgtgattttgcttttcactttgcagtaggttatccattttaaagaaaaatatataatatgatgaaagaaagaaagagaacatatactgaggaggaggttaatgagttgaaaaaatggtttgattctcaatcacttcctccaacaatgcagatagataaggctgcttttactcctaatttaaaggatacggtagatatgctgtttgagcaggcctatgtatgttacgaaaatcctaaaatgcagggatgtctttatttgttagagaaaattaagagcaatttggaaaaaaacggggcaggagcgtgagcaattagcatttcatattgttatcaaggtattataatttaatactgacagtatgaagaagaatttattattgtatggtgtatttctttgcgccctctccatgtcctcttgttccggtggttccaagagtagtcatgttatggatagcagtagcatgagtgtggagaatgcgaatgaagtgatgaagtattatgatacctcattgaaaatcttgaaagacttagttaatgagaatgagataaaagcggtgctgggctacttggatcagaagatgccggtagattctctgcctgtggtatcacagcctgtggtttctgttcaagatacagtgtttgtttctaatccgggaaattacttcaacgagaatgaccgtcagaatctgaaggaaaattatggccgtttgttccggtcgatttctgcattttatgagaactataagacttaccggctgtatatgcaggatcaatcatataaaaaggataataatgctttggcggataaaataagaaaagaggagctattattgagtattgctttatctgaatacaaacaggttatttttgatatattaactccgatggttgagggggctaaaataactctgactcctataaagggagatgttaaagataaatagaagtataacaggcagctggaaggttgcctgtttggattgtattatgtgaattaaatccttgttgttctctgctttgttgttaaggaagctatttcatttccaatcttcttgattttttctcttaaatattttcagtctgttcaagaactatttttagatatatcttttatacgttcccctttagagaaacttgacattccggtaggagatgcttgcttgtagatttctattgtttaagtttatgctataatgatgaaaaagccaaaagggtatgtatataggataaatagaactcagatggattgctgatattgttttaattgtccatttaatgggttgaatttaataaaattgttaataactttcacataacttttctataaataatgtgaagtttaataaggtgttttttatctttgtagcagattaattgtaaaaaagtgctgtaatattatttgttatggaaaaatcgtatgttataaatagaattaaagaattatgcaataaaaagaatgacagagagatagctttggatttctcttataataataggatattccatgcaaaatatttatttttaggcaatgacctttatattacagatacattaaatgttattgagttaaaggatttggatatgggagttttgagcagacttagcgaattattaaaaatataagataactgattttccttgtgcagtcattgatggctgtacgctcatttgtattttaaagcggtggcccgggaggggtagccgcttttgtttgatggacttataacaaaaaaggaataacttttgttactcctttcgtacaccctcagggattcgaaccctggacccactgattaagagtcagttgctctaccaactgagctaagagtgcaaaatgcaaactatttttccgtacaccctcagggactcgaaccctggacccattgattaagagtcaattgctctaccagctgagctaagagtgcaaaatacaaactattttttcttttgtacaccctcagggattcgaaccctggacccactgattaagagtcagttgctctaccaactgagctaagagtgcattcttttctgatttgcggttgcaaaggtaggtgttttcttttaaacatccaacattttgcatcattttttcaccttttcatcgaaatttattcaaactcataaatatctgaaggcgtattccgctttaaggcaatgacttgcacatctttgccaacgataatccctttgtttcgtagtgagagttctactgtcttatatgccagttcggggtgattattgtctttgctaagatgacaaagccaaatatatttaagactttcattgatattttctgccaaaaaatcggcggtttcgcggttactcatgtgtccattaggcccggcaatacgttcttttaaatattggggataaggtcccattttcaacatctcttcatcgtaattcgcttccaataccaaatagtttgctttgcatatatattcggcggcagtgggagtgatatgccccaagtcagtaaggaaagaaaatattttaccgtctatatttatgcaatagccaacattgtcagttccgtcgtgaggcacttcaaaggcagtaattgcgaaatcttccaattccattgtctcacctttgtgcaggtagtgtacgcaggtcgataatttctcggtcatgcaataacttttgttgattcctgcatgtacttccggagtagagtaaacaggaattccaaatttctctcctaaatgccctactgctttgatgtggtcggcatgatcgtgtgttatgaatactgcccggataatatccagtccgattccaagttcttttaatgttttttttattgtacggatgccaatgcctgcatccaccaatatgccatatctgtctgttccgagaaaatagcagttgccgctacttccgcttgcgagacttataaatttgattttcattttgttgctctcccaattctagtgaatccccacgttttttgtgttaaaagagccgcaaatatacataaaaaaaggaggaaataaaatagaaacaggctttttcagaaagatgatttagcggatattgttttaaaagaatgcctggaatctggattatggaatacgtagataataaccctttcctctgactgttattaatttatattcttggaattcttttaaaactttccggattgatttgatgtgtgcatctattttttcattggcattatcatccgtaggccagagactcttttttatttcttcacgacttacgcaagttcctgctttttcataaagcatatttagtaaagtgaggtctaatttctgaatgttgcactttttgtttcctatatacaactcttgtttctccatgtctatgttcataagagtaaggagtgtttgagtatccttttcctttttaagaaaaatgagtatgaaaataagaatcatcaattgtccgatgagccaaaagagagtgttgtctatgtgtcgtaaaatggttttgaagtcatagtttacccatgcttgtaccttgatgttttgggtgatatctactatgtatcggggagtattgtatgccgttcggggaattgcagaactttggtcactgtgttgggaaatggatttgttataataaatagttccggtcctgccggttatgtcatgatcggataatatctttctaaaggttgcatttaattcatcgggctttatgggttttagttgggatagaatgtattggttcagcatacgtttggcggtctgctcgtccaggctgtctttaaaggtatagattgtttttccttgtctggttcttatggtgtagctttttactttttgatgtaggctgggagcgatagtatacatctttatatcccagtttgtaggttcgggatgataatagctgatataggaaagtctttcattgtaatcttccgtaatggcggatttgaaagcgtggtctatttgggtgtttactcgttcggtactattatgaaaagcgatataaacagtatatagaacggtggtggtgactgccataaataagataatgtgtgtttttgcccttttcatcgtatgaattttgaatgcaaaagtaaataacgttaaggaaaaaacaggtgttttatctgatctttttctgaaaaaggagaaaattcagaaagagttcagataaatattttgcagagatacaggcttttcttcttctttgcgtcaacaaaatattttgcgaatcaataaaagcaagaaacgtatgagaacaaaagctgttttattttttctcttgttattgccagtgtatgtggtgaatggccaagatgacaagagagagtatttgaaaaaggtgttgaataatttagagcagattaagtcagcaacgtataaagtagagggcgaagtctggaatcctggtgatacaattccttccagtattagaaaatatatggtgaaagagttcgataatccggcagattctacgataggggcaagttttgtgaatttgggaacagatgatggtaaagagttccaattcggttataatggtgaagtacgtgtgttggtgaatcatgctgtcaaggaaataaaaatcgataattttaccaccaggccgttacctgtcagaccgttgtccccacctttctttaattattgcaaaaatattgtcaggtatgctttggaaacagaagacagcatagccaccacattggaagactgtggggattattttcattttaaacttgtcataaacgaaaatacacaagtggagttctttggtaaagcttatcacatgcctccacctcctttttatgtagagcagacttctatttatgaactgtggattcacaaatcgaatggtttgccttataaaaaacggagagcaatgtcccatgatatatcggtggaaacttgctgtaatgtggaaataaacaaagaaacaattgacaggtttgatgttttcgattatgttccgcaaggttatgaaacaaaaaaatatgattatggcgttccttccaggaatatggccgctaatctgacgggtaagaaagcaccagaatggacattgaatgatataaaggagagtcccgtgtcattgagtgatttgaaaagtaaggtcatcttggtaaatataacaggaataggttgcggagcttgccaggcttctatcccttttctgaaagaactgaaaagaaagtaccaagaagaagattttgaattggtagccattgaaagttggagccggatgcattcacttcagaattatgcaaagagaaaggaattgaattatatgtttttggatggagatgataaagtgatagaagattaccggacgggtggggcggctccgtacttttttattttggataaagaacggattatacggaaagtcattcgaggatatggcatgggaaagaccgacaaggaaataacggaggctatagaagaattgctataactagaatgaggatggaacaaaaagtgaaaacttttgcagacacatttgttccatcctcatttatttatattcagcactctgacggttgtcaaaattggaagaacttcttggcattattatagcagatatcttccaccatctgattgacgcgttctatttcgcaagcagggatttcgccgttttccacatcattacccagcaagttgcacaaagtacgacggaaatattcgtgacgcggataagacaggaatgaacgagaatctgtcagcatacctacgaagcggctcaacaagcctaacaatgacagtgcattcatctgtttttccataccgtctttctgatcgaggaaccaccatccagaaccgaattgaattttgcctggaattgtaccgtcctggaagttgcctaacatggtagcaattacttcattggcgcaaggattcaagttgtaaaggatagttttggccagttttccttctgtattcaggcggtcaaggaattttgccatcgctttggcggtggtaaactcaccgattgaatcgaaaccagtatcaggtcccagaagtttgaacatcttggtgttgttgttgcggattgctccatagtggaactgctgggtccagcctttttcccaatccatttccccaaatacgatcagcatggctgatttgaatttcagaatttcttccttggtcagttctgtaccaccatatactttattaaatatagcattgatttcagcatcagtatagtcttcagcataaaactcttcaattccgtggtcagacaatttacaaccttgttcagcaaagaagtcatgacgtttccgcaaagcagtcaccatgtcatcgaaagaagagatcgtgacaccgcttacagcagacaatttttccatataagcacggaaatcagcaggaacttctactgccatagccttgtctggacgccaagtgggaagcattttaatttcgaatccgctttcacgggttttgatgtgatattccaatgaatctaccggatcatcggttgtacaaacggtttccacatgataacgacgcatcatgcctcgtgcggagtattccggtttggcaagcttttcattacattcatcaaaaatctcgcgggctgttttcggattcaatactttattgattccaaatgcggttttcaattccaaatgagtccaatggtataatgggttgcggaaggtataaggaactgtttccgcccatttttcgaatttttcccagtctgtggtgtctttaccggtacaataacgctcgtccacaccgttggtacgcatggcacgccatttatagtggtctccacccaaccagatttctgtcagtgacttaaactgatagtcgtcagcaaccatctggggaatcaggtggcagtggtaatcgataataggcattttagccgcatgttcatgatacaacttctgcgcagtttctgtctgaagcaggaagttttcatccataaagtttttcataagtagtctttttatatctatataattgttgtttattttgactttcagtaaaaactcattctaaaaaagatgtcaaagagcatctctttagatttattaaccgttatcgaacacgaaagtagaaattttatttggaataacaaaattatttgtatctttgcggcgaagatttaaagattttaaatgcttggatcaatgatgatatataaaaacttaaatatatattaccgtttaagagaaagcatgaatactatgagtacacaataaaatctgattcgtcttcgataagtacaggtatggataaacacataatataattaaaaatatgaaagcattaaacaaggagacagcagcaaagactcaacgtcccgaaagaatcattcaatttggtgagggtaactttcttcgtgcgtttgtggattggattatctacaacatgaacgaaaaaactgatttcaacagcagtgtggtggtggttcaacctattgaaaaaggcatggttgacatgttgaacgcacaagattgtctgtatcatgtaaacttgcaaggtttggataagggacaggtggtaaacagcctgacaaaaattgatgtgatcagccgtgctttgaatccttattctcagaatgatgaatttatgaaattggcggaacagccggaaatgcgttttgttatctctaatacgacagaggccggtatcgcttttgatcctgcctgcaagctggatgatgcccctgcttcatcttatccgggcaaactgactcagttgttgtatcaccgttataaaacgttcaatggcgataagagcaaaggtttaataatcttcccttgcgaattgattttcctgaacggtcataaactgaaagaaaccatctatcaatatattgaattgtggaacctgggtgaagacttcaagcaatggtttgaggaagcttgtggtgtctacgctactttggtagaccgtattgtaccgggattcccccgcaaagatatcgctgctattaaagaaaaattgcagtatgatgacaatctggtggtacaggcagaaatcttccatttgtgggtaattgaagctccgcaggagatcgccaaggaattccctgccgacaaggccggtttgaatgtattgtttgttccgtctgaagctccttatcacgaaagaaaagttactttgttgaacggtcctcacacagtgctgtctccggtagcctatctgtctggaatcaacattgtgcgtgaggcttgcgagcatgaagtggtaggtaaatacattcataaagttatgttcgatgagttgatggaaaccctgaacctgccgaaagaagaattgaagaagtttgcggaagatgttttggagcgtttcaacaatccgtttgttgatcaccaggtgacttctatcatgctgaattcatttcctaaatatgagactcgcgacctcccgggtttgaaagtttatctggaacgtaagggtgagttgcctaaaggcttggtattgggactggcggctatcatcacttattataaaggtggtgttcgtgctgacggtgctgagattgttccgaacgatgctcctgaaatcatgaatctgctgaaagaactttgggctacaggctgcactcagaaagtggcggaaggcgtgttggctgcagaatctatttggggtgagaacttgaacaacattccgggtttgaccgcagctgtgaaagctgatcttgactctattcaagaaaagggtatgctggaaacagtaaagggtattctctagattaattgttagaaatagtttataaattccttgagggagatttgggttattaaactgaatctccctatttttgtaactatacaaaatagatgtggcctatggagaaacaagaattcagacccagctatcctttatgggtttggacggttattgctattatgttggtggcgtgtacatgcctttttatagcgcatggaagatatgcatctttgctggtcttgactccttctctgctgataatgggggtaaggttattgtctgtttatactattactcctgattcttttaccttagctataagagggatgaagcctcagcatgtttttcctttgcaaaacatcacagagatagaaaaggagtacacaaagtctggtaaactcaagtcgattgtgatccgttaccggaaagaaggaatgtaccacaattttttagttatcaagaaagatgatgtaaatattgaaggtattctgaacgctattttgaactattgtccttccgtatctgttcgttaaagatgatcattagggaaaaataaggaaatactcttcttttcagttccgcctgatgggaagaatgatattcttcggctgtcgatatattttcaaaataatgataactgtattgggggtgggactccatgtaatcctgtactatatccgcacattgagataatttcatgataaccggcacatgatgatggctaagatacatgtccagttcatccgaagtaatattgcccggaataatgaccagtctttctttttggctgatgagatgtagttttgcggcagcttccgcagcgatgaatgaaggaataccgggaagttgctctacggggattccattttcttcgaggagatccagtacatagtgaacggaggcgtaaattcccgcatcgccttctactgctaccgccaaccgttttcctgctttttgttccagcctcattttttcgaaaagttgccgatagactttgattgcttttgtcctgtctttgctcatcgggagtgagaataggtgtatatctcctttgatgtctagcttatgtaacagggtggcggcacgtgacaaaattttatctggttcccgaaccgttgatggacaatatattatgtctgcttgttgtaaagcatgcaatgattttaatgtaatcagttcggcatcaccgggtcctaaagaaacaaaatagatcggatgactcatcttttgtgggtatttacagtttttaagcacgcaaaagtgctgaaaaattctgtataaagcaagagaattgattacctttgttggctgaaaaacagaaaagaacatgaaaaaactaatattggcttcggggctcttgttattattgactgttacagcctgccaaagtaagcacaaacagggttccgggaatttggaacataagacattgacagattcttctattgtgaagattattccggaatatgcccaagggtttaaaataacttatacggatcaggcttgtctgcttgacattcaggaccctcagaataaagaaagtcagtcttttcattatgctttggtgccaagaggtgtggaagcggaaaacatacctgcggattatacagttattgaaactcccatacgaagcgttatctgcatgacttccctgcaactttccaattttatcaagttggaagagctggatgcagtggtgggtatcaccagtacacgccatttgtttaacaagaaaataaatgatcgtttgaaagaaggaagcattcataagataggtattgaagggaatttcgataatgaggtgattatgagtgtaaacccggatttgattttgatctctccttttaaacgagggggatacgatgctttgaaagaggtaggcattcctttgatgccgcatttgggatataaggaaatgactcctttgggacaggctgaatggataaagtttgtgggcttgttattgggaaaagaagataaagctaatgagcagtttgccactattaagaaaagatataacgagctgaaggaactgaccggccgggtgacaaaacgcccggtagtattcagtggggaattgcggggcggcaattggtatgctgtaggagggaggagttttctcgcacaattgtttaaagatgccggtgccgattattttttgaaagacgatgaacggtctggaggggtcaccctcgattttgaaacagtctacagccaagcggccggtgccgattattggcgtattgtgaatagctatcaaggaaaattttcttataacacgttgaaagaagaagatgcccgttatgttgattttaaagcatacaaagagaaaggggtgatttattgtaacatgcgtgaaaaacctttttatgagagtatgcctacagaaccggaagttgttttggcagatttgattcaaatctttcatccgcagcttttgtccggccaccaaccgggatattatgaattgcttaaatagaaaaatagtatatgaaacgacctgttgcattttatatgctgttaattatggcttctatttttctgtttttcttcctgaatctggtattaggttctgtttccataccgcttcgtgctgtgtggaatatcctttggggaacagggaatgagtctgttatctggcaaaatattatttggaaatcacgggtaccacaggcgcttaccgcattggtggcgggggcggggctctctgtcagcggtttacagatgcagactgtttttcgcaatcctttggccggtccgtcggtactgggcatcagttcgggagccagtatgggagttgcttttgtggtgcttctttcgggtagtttgggtggcgttgctttgagcaagctaggctttatgggggaaatagcccttaccatagcagctattgcaggttcactttccattatggcacttattgttttcgtttcccaaaaagtaaggggcaatgttactttgttgattatcggtgtgatgattggttatatagccaatgcggtgatcggtgtgctgaaatttttcagtgtggaggaggatattcgtgcatatgtcatttgggggctgggaagttttgcccgtgtatcgggagatcagatgactttatttatatgtatcatggtggtattgttgccactttccttcctgcttgtcaaaacattgaatcttttgttgctgggagatgcatacgcacggaatctcggattgaatataaaacgtgcccgtctgcttgtcattacttgttcgggagtattggtagctattgttaccgcatattgcggtccgattatttttctggggctggccgttccgcatctttgcaggggaatgttccgcacatccgatcatcgtattctgatgcctgcttctttactggcaggtgcgtcattggcattggtatgtaatttgattgcccgtatgcccggtttcgaaggtgcattgccggtaaattcggtgacggctttggtaggcgctccggtagtgatgtcggttttattcaataaacgtcgcaatgaaatgaatgagtaatgatgaatcaagaaactatacatattcggaaactgactaccggttaccccggtaagggggggggcaagattgtagcgaaggacattgatgctactatccgcagtggggaactgacttgtcttttgggtgcgaatggagtagggaaatctactttattgcgtactttgtctgcctttcagccggctgtaggaggagagatagaaataatgggaaagaaactgacggattacaccgataaacagttggcgacagttatcggagtggtattgaccgaaaaatgcagcctgcggaacatgaccgtagaagaactggtgggtatggggcgcagtccttataccggtttctggggaaatttaagcaaggaggacaagaaaacagtaaacgatgccattgcgttggtaaggattgaggatttgaaataccggatggtacatactttgagtgacggtgagcgtcagaaagtaatgatcgcaaaggcgttggcacaggaaaccccggtgatttttctggatgagccgactgcttttcttgatttccccagtaaagtggagattatgcaattgcttcatcatttgtcacgttctaccaacaagacgatttttctttccacccatgatttagagttagctttgcagattgctgataagatttggctgatggataaagccaatggagtgactataggaactcctgaagatctttccatagacggatgcctgagtaattttttctctcgtaagggtattgtttttgatatggaaaccggactgttccgcattgacaatgagtttgaaaaagaagtccgtctggtgggacatgggaataagtatgcgatggtacggaaagctttgcagcggaatggtattctggcaagccggcgtgttgagtccgatttttatattgaaacgggagatatgactaccaatggatatattatccacccggtagccgggaggacgataaaggtagataccatagaaaaattgttagaacaagtcactgctatattagcttccgtttagcagcgtttaaataatcagttattgtatcctgaaaggaatattcccttcttcatcaatcaagaggattgttaattttccttcgggcaacaaggggacgcaatgtgcaaaacaatgttccaacaaacacggaaagaactttccgcagtcttcttcagacagcaatgtccataattcacgggctaatgtcaacctttctatcatgctttcaacatccggagagcatccggcttccattgccacttgttttaggaattctttattcatcactactttcttactatgtgtgtccagatttccttcggccagtttcaccgctttgcctatcataatgcctaaagtaaccaatggaaccttaagcttggcagctatcttgagtgtctccccgataaaatttccataatgtacaaaagcctgagcaggtaaccccggatactccttcttcacaaaacgttcgctttttgctcccgaattaatgatgagtctggatgagcccacagccacacaaacctccacttccctgcggatagcctcgacaaaagcttctgaagaaaaaggacggacaatgcccgaagttccaattatggaaatgccatccacaattcctagtttaggattgaaagtacgttgtgccaactcttttcctccgggaacggaaatggtaatatccagccctttatcataaagcgccgataattctttcattatcatttgtcgggggatgcgattgatggcgggttccccgatttccaatcccagccccggaagggtgactcgtcccactccttcaccttgcaggaaacggatgtccgggtgattgctaaaacttaccgttaccacaatggatgcgccgtgagtgacatccggatcatctcccgcatctttaacaacggtacaggtggcactgttcttttctatttctgtatgggataccggtaaggtcatttcctcgtcatcgggaaggcggaaggatatcattttctgttcttcccctaaaatcagagccgtcaatgctgcttttgcagctgcagtagcgcaggcccctgtggtatagccgcttctcaacgggtaaaaagcagggatgttcttttctatctgttttctcaatccatattcaccggtaacgatcatgaaatgccggggaagggaagggcgttttatagcaaagaccgggatttttgcagcctgtgccgctttcactttctccgaaaatcctccggattctccgctttccttggtcagaatggcttgtggatgtagtgtctctaataaaagagcttcggattctccggcatgatagaataccagattttctttcgggaagccttgttcttgggctaatgtgatggaagtttcccgttccagtacgcggaaccaacaggtatgtttctcccaataagggcgtaacttcccgatggtctgtactccggtcagtgccagcagatgatcggttcctgctttctctaaccggtaaatggcatctgtatagtcttcacaccagatgatgttttcggtgcgtggaggatacttcctttcaaaacgtatgacaggaagatgtagtgtccggcttgtttcatccacagtccggtggagttgggaggcaaacgggtgggcagcatccaccaataaacggatgtcgttttggcggcagaaactttccattttctccgtgttcattcctccggtgatacggatgccgtgcttgcattgtatctcctgccattctcctttggtagagtagaagtagggctttccggcttcatcggcaactttcacggcggtgcgtccttcggtggttcctcctaaaatcagtatcataggctggatgtgaatgattctttttttactttctgaacaagtgtttgaactcgtgcgcatagagccgggacagacctttccggttgtctattgcttcgcctactaccaataaggtagtcagcgtcaggttattgtcacgtactatcttagccaaatccttcaactctccgcgataaatcttttcttctttccaagtcagcttataacaggcggcaaccggagtttcgggagggtatgcctgcatcagctcttcctgtacctgttccacaatgcccgcacttaaataaatgcacattgtactttgcgattgcgccaatttatgtaattgttctttttcgggcatcggagtacggccttccccacgggtgaggattatactttgtactttttcggggatggtaaactgtgacctcaatgctgccgcagccgcttggaacgaggagatccccggagtgatatgataactcatcttgtagcggtcgaagaaagccatttgttcctggatggctccataaatgcaagggtctcccgtgtgcaagcgtacaataaacaatcctttatcataaaactttttcatcaaggcgaactgttcctccaaatccataccggcggaactgcgtacagtcgctccttctttagcataaaaggtcaattcgcggggaacaagacttccggcatacagaacaaggtccgctttctccaacattcgttttccgcgtaccgaaatcagttcgggatcaccgggacctgcacccacgatctctatatgtccgccacgcatggctgtcgcactgacggctatggcaaaagtgaagtgatttccttctgtcagcatgcccttttgtttttccaatacaagtgttccttcaccgctgcttttcaaggccgtgctttcggccactccatagacgcctgtcacttcgaatgctttttcagacggatgggggactgtgatatctttcagttcttccgcaggataaatatgggtttccgtatcggcccatcgccggtggaggatttccagcagaggctcgtcttttttcagttcgatggtattgagggaggcgagagagaacggacacaaaccttgtctgtgcatcacggcttctatgtattccgcaatgcccgaaggatcgcattgtttccggcaacctattcccaagtggaggacagcgggatggaagcagagcatgggaatctccgcactatatatataaggtgtaacagcaataatcaacttgaattccgattggggtatgtcttcgaaatgatagaacacttttacgtgtgcgggaagtgtgcgttccagatactccgtacctttatcctttatatcgagcagcagcaccgttggttcccggttgacaaaaagtgtgaccagtctgttcatttcagcatgaggaacagttattttccagtcatatttttcagctagcgtgtccagtgcccataacccggcattgtcactttgggtggtaatcacagcttctcctcctgtaatggcggcaatatggcgggtcagttcattggctccccccacatgcccggaaagtactgaaatgacaaagcgccccgtactgtccacacagaccactgccggatctttatatttgttttttatgcatcctgcaatgctgcgtacacagattcccatggcaccaataaagatgatgctgtcgaagtcattgaaatgctcctctatgaaccgatggcaggatgtgatggaaatacagccttcgcattcgtttttggtataaataagggtatccggcaactctctttgtagtgtttttgccaacggcaggctggcttctgatatcagtatgattgctttcatttgttatctgttttaaatcatttattccgctctcattatctctatcggattaaaggtatccacagcaatacgggtacactgtgttaccttcttgttgatttgtgttataccttttgtgaacagggccttgctctcttccgaaaccgaattgaatacaatgactccgtcaggcaacagcacttctttgattttttgtagaatctctatcatttttcctccatgaccacctataaatacggcatcgggggcgggaagcccgccgagttccgtttccagaaaatcacccatgacggttgtaatgccgggcgtgccgaatttacgactgttgcgttccattaactctttaccttccgtacgctgttcgaatgctgtcactttcagctccggaaattggagtttggcttctatggaaacggaaccggtgcagaaaccgatgtcccagaatgatttcttttcccttaatgtcagcatactgagagtaagcaagcggacaggcattttggtaatcattttgttgcgtccgttcaacaaatgaaattcactttcgggaattccgaacggacggggatgcaccttgtttctttgcagtatcaggcaattgggaaagcggaaagcagattgggaggcttcctctaaagagaatgtacgtacagattcttcctcgccattgcctaatgcttcccccacggtcatgcggtagttgtcatatccatactccagcatccgggcggcaatggtggcaggtgtcttttcccggtcggtcaacacgcctatcagtttatctcctctgattaaagcagagtcgaatgcatcccaaggacgtccggtcagcgacaaggtctgcatctcctgataggggagcaatatacggtgtgccagcatttgcagcgagttgaaggtggggaataagataatctttgccgacgggagttttctcatgacggtattggcaaagccgaaaaacaacgggtcgcctgaagcgaaaacaattatttcgggatgttcctcgtaacgggagaataccgcatccagcgggacggtgatgtctatccatacggcatcttccggcaaataagcgtgtaccaattcatgatgacgttttcctcccgagaagactttcccttgagaaaccaagttccggatttcaggagaaagaaattgattccggtcatcgcttatacctattatatagaatgtttgcatggacttatacatctcttcccggtttcagttgttccgcatcatcaaaagtaaggatggcatttaccagagtcgctgccagattgcttccccctttgcgtccttctactatcagtttggggatgtggctgaaaggtttcaccatgtgtttgctttcgcaaacgtgcacaaagcccaccggagcagcgatgataccgcatggatgcgctttttctttccgtatcaggtcacacagttccatcaatgctgtaggggcattaccgaatacatataaagcttccggatgttcctctgctgccatacgtataccggcctgtgtacgggtgattcctttttcttttgccaatgctgccgcgcgttcgtcacccagatagcatttcaccccgatgcccatccgttccaaagcacctttacggatgcccgcggcagccatcgtcacatccgtaataattgtacgtacttttccttcattcaatattttatacagacattctacggcaagaggatctacatgcaatatgttttccatctcgaaatcggctgtggtatggatggcatgcagtaacgcccatttgtgatccgaaggaatatttttatttttcaattctttctcaatagtacggaaactgtttatcataatttcctgaccgattcctgtcgcatcggtggtcttttcccggtaataaccacgcggagtgattaatttcccttcccgataataagactgggagttgccaatcaataccactgtaaacatatccacctgttcgggatcgaattcttgcaaagtggtgattgtcacagtttcttccttacgtccggcctgacgcacaaagcctaccggggtttcggcttcacgctctttcagaaaaatttcttttaatctgtagagttgccaataccgcccttcgcttttgggattatagactgccgttacgaaatctgccgttgcggctgcatggatgcgtttttcaatccggtcccatggcgtcatgaggtcggagagagaaatcacacagaaatcgtgaccgatgggtgctcctaacagggaagccgctttctgaaaagcactgatacccggcaatacttctatttctacccggctgccacgctcgcgtttcatttcgtaaaccagcggagccatgccataaattccggcatctcccgagctgataacgcatacagtctttccttgttccgccagctcgaaagcctgttcggcacgtgctttttcacgtttcattccggtgtctatacattcggtgcccggttccaggtagggctcgataaactggaaatagtatttatagccgattactacatcgctgttctttactgcttgtattacagcgggagtcatatcttcaggtgagccgggaccaatgccggctacgattaattgggcctttttcattttttattatataattattcctctccggaaatctaatttaaaagtttccttcagtgctttcagtcaatataatcctctgaatgacaatacgctgtcctgacagtagttccttcatcttgctttcaggcttttacatagacggactgaaagtgatagctggcatgaggagccaaacttaaccgtacaaagttacttatttgaacgggagaaacaagccttttcttgctataattatagaaatctttttttatcaggcttaataatgaataaggcatcattcagaatgtgccgtaatcgggaagccggcaaagcagaggatattgccggtgaaaatttaaacaggaactaaaaataatagagatttgctgatagataagtttgaagaagaaatgttggcggaatcattggggggcactatggggatggttaagcctttttattcctgcacttaagcctttttgaacgtatgatttctatctccatagcctttggagttaactccaaagcttatggagataactccaaaggctatggatttaactccgcaagcttgggagataactccaaaggctatggatttaactccgcaagcttgggagatagaaatcatacgttcaaaaaggcttagtcacaaagatgtgagagcttaggaatcggtttgccggagtttgtcctgtatggaaaaaactgcctccgctgtttgtatcatatcggattccgttattttaaggccttgccatccgagaaagcattacccactttttctcctactttcagataatcattattgaacgggtcgaagatgacgggaataactttggaggcatccacttttccattcttatccagtgcacgttcatctacacttacattgactatttcgccgcgcaggatacaggtttcgggattgtaatccttcagcttgcattccacagctacggataattcatcaatcagcggggcatccacaaactccgaccgggtggcatggaatcccgcacgggcgaatttgtccggaaccttgttgcccgaaacaatgcctacataatcgcaagcgatgatttgcccggcttctgccatgctcactgtgaatgctttgcgtttcagaatgttggccgttgtcttgtgaccttcactgatacaaatactgatttcattcatttcactgataccgccccaagccgcattcatggcattgggaataccgttttcatcgtatgcagcgatgataaataccggttgcggataggtaaaaggttttactcctaaattctttctcatactatttattttttagtccattgtttaatctcttctttggtagcaccgttcatcagcctgcctttctgccagttcaggttgggataggctttctttaattcttgttcggcgttagaaatgcggcttccacccgaggtagcgaatggaatgaggatcttgcctgtgaaatcacctttttctataaaactgttgatgattcttggagccaggttccaccaaatggggaaaccgatatagatggtatcataggctgccaagtttttgggctgggaacgcaatgcgggacgtgacagggcgtctgccatttccacactgctgcgcgaggatttgttgtgccagtccaggtcggcggaggtatatttctttgcaggttgtatttcgtagagggctccgcctgtcacctccgctacctgtttggcggctttctctgttgtacctgttgccgagaagtaagctactaatgttctgttgctctgttgctgtgcgtttacggtaatacacagtatcatgattaccgtcataaataatccgagtcttttcatacgatttatgttatttggttcaaatatacgttttaatattttatgatgttgcaaatttaggtatatttgcttgggttctttgtagataaattacgggtatcctaaccttaattacagattctgccatataatatggaggggtagtccggcaggaacattccggctcttctttttattcccggatgggataagattcagtaactaaggtaaaataatccgtaattggggttataaccttgtccggataacctcctatttttgtaaccgtattattcaaataactgaaaaagctatattttagcaggcattaaacaagttagaatgatggataaaatattaaatttagacagtgtggaccaatataacagtctatacggacttgaaacactgaatccgttggtcagtgtcattgatttgaacaaggctacccggcagatggactatgtgcactggaactatggtgtttatgcactttatctgaaattggagaaagcttgtgatatcaagtacgggcgtcggagttatgactatcaggaaggaaccgtagtatgttttgctccgggacaaacaacggaaaccacattgaccaccgaccgtgtgcagttgaatgtgcttggaattctttttcatccggatttgttacgggggactacgcttggaaaaacaataaagaaatatactttcttttcgtatgaagtgagcgaggcgctgcacctttcggaagatgagcgcaatattatgacagattgcctgaagattatccgtatggaactggaacggggggtggacaagcatagtaagaccttgctggtaaactatatagaactgcttcttaattactgtatgcgtttttatgaacgtcagttcgccacccgcagtcattcgaaccgtgatgtgttgacacgctttgaagggttgcttgacgattattttgagggcgaacttgccgagcgtgacggattgcctaccgtgaaatactttgctgacaaactgtgcctttcatccaactacttcggggatatgttcaagaaggaaaccggcaagaccccacaggaatatattcaggaaaaagtgatagaactggcgaaagaacggatgtccgacaggagagaaaccgtcagcagggtagcttattcactgggatttcaatatccgcagcatttctgccggttgttcaagaagcgtgtgggctgtacaccgaatgaatatcgtacacaaaaccttcctttatagtatcctgttttaacaagcaatgaaagagactatgttggacttgaagactgtatatgaatgtaatcgctgtctgggttgcaagacattgcatccgcaggtgagcatcatcaatctggagaatccttcattggaagaggatgcggtgaaatttgaattctatgctgtcttgctgattgaggattgtccgagcggttgttgctgctgcggacggaaatattatgattactccaatgctaccatggtgtttctcactcccggcgagatctttcgtatgagtaaggagaatacgttgccggataaaggatatcttttggcatttcatcctgacctgttgttccgcacctcactgaagaatcatattaaaaattatacctttttccattatcgcaaggaagaagcgctgcatctttcacggcgtgagacagagaaagtgacgtgttgcctctcgaatatagaggatgagttgcatcatcccattgatactcatagcagtattattctttcccggcatatagaacttctgttggattattgcacccggtattatgaacgtcagtttattacccgtgagaataagaacaaggctcttttggaaaacatggaacgtttgtttgtggaatatatcgcatccggaagattgcaaggcggcaagttgcccacatccggctatatggcgggagagcttgatttgtctgtcgcttacttcaatgatttgctgagatttgaaaccggcaagactttggaggaatattttcaactgaagcggctggatatagccaggcacatgttgttgcaggacggtcatacgcctgctgctgtggcacggaagttaggctatcctaatgtgcagtgcttcagtgtgcttttcaagaaaataacaggtgtcgcccccagtgattaccggctctcgcagaattgataaccgggttgcaataccatgttcttgtgatacagttcctttctgtaaaaatggtaattctatctgtaatttatctacaaagaatgaatggggtctggcttatctttgcattgtgaaatgaaagcggctttgttcgcatcggaatgaagtaagacaacagatgaaatcatttaaataggtagaacgatgtatattgaacaagtaaattctccgcaagacataaaacggttttctgcggaacagttaagacagttggccggtgaagtccgcaatgcattattgaccaagttaagtgctcacggagggcatgtgggacctaatctgggaatggtggaggctacaatagcattgcactatgtattcaattcaccgacggataagatggtatatgatgtatcccatcaaagttatacacataagatgctgaccgggcgtaaggatgctttcctgaatccggaggattatgatgtggtatccggatacaccaatccccgggaaagcgggcacgattttttcactatcggccatacttccacctctgtcagtctggcttgcggtcttgccaaagccagagatctgaaaggcggacacgagaatatcattgccgtgataggggatggatcgctcagcggcggggaagcttatgaaggtctgagcaatgcgggagaaatgggaaccaaccttattatagtggttaatgataatgaaatgtccattgccgaaaaccacggtgggctctatcagaacctgaaggaactgcgcgatacggagggacggtcgtcctgtaatttcttccgttctctggggttggattatctttatgtgggagaggggaatgatattccgtctttgattgcggcttttgccaaggtgaaagatacatcacgtcccacagtggttcatattcacacacagaaaggaaagggatacgctccggcagaagccgaccgggaggaatttcattgggagatgcctttcgatctggaaacgggtaagccgaaggtggattgcagcggtatggaggattaccatagcctgaccgggaagtttttgttggagaaaatgaaggaggaccacacggttgttgccatcagctcgggtactcctactgtgataggttttactcctgaacgccggaaacaggcagggcgtcagtttgtggatgtaggtattgccgaggaacatgccgtggcattggcatcgggtatcgctgccggtggcggacgtccggtgtacggggtttacagtacttttgtccagcgttgctatgaccagttgtctcaggatttgtgtatcaatggaaatccggcggtgatcactgtgtttatggggacagtagccggaatgaacgatgtgactcatctgggtttcttcgatattccgcttatcagcaacatcccgaatatggtttatctggctcctacgtgttccgaagagtattttgctatgttggaatgggctgtccgccagacggaatatcccgttgctatccgtgtgccgggagcggcagtggtgcatcgtaaggaagagtttgacacggattatagcgagttaaaccgctacaaaatgacagccaggggagaaactgtcgctattcttgcattgggtgctttctatgatttgggacaggctttgaagaataagctccgggaagagtcgggtgttgaggctactttgattaatccccgttacataacagggcttgacgaaccgatgctggaagagttgaaagtggggcatcgtattgtcgtaacgttggaagacggggtgctggatggaggattcggcgagaagatagcgcgttattatggtaattctgaaatgcgggtgctgaattacggacttcgtaaagaatttgcagaccgctataatctggatgagctgatgaaagccaacaggttgactgacaagcagatggcggaggatattgccggtatattaggataaccgttttacggaatggctgaagtctaagacttcagccatttttgtaatagtgaaatagataagccggattaaaactgtttgttaccataagtatgagaactggaatacttattctttttccagaagcgaataaaacacaggatgataatcgggaagtagttccgggtgaaaagcttttatcatgtcactcagaagaatatcgggtgagaggggaagattctcatacaaaggtatccattccagattgcaataaataactttcttttctttaaaagcccgaaaatcagcatattgtggattggaagcttttaatgcttcataagagaactctcctttataaccattcatcactctccagtagccggcattatatcctttggcgtatacggtttcaaaatccatgagtacacctcctgtttcaggattatccttcataaagtaatcggcccctgcgtcggcgaacaagcgggcatagaaactttgtcctccgggtacataccaggtacctcttctcatttctccactgaatacactgggacgctgttttacattggaaactttggctttcaataggttatagcgttgttccatttgtgcaaataattggcatgcctcttcctctttaccgataaacatacctgctaccttgatccattcggacagccccaatggtgatgtttccttgaatgcccaataggggaccagagggatgttcagctctttcatcacttcataccctccccggcggttgggagatacgaaaatgatatcgggttgggatgcaatgataatttccgtatcaaagtttccttccattcctatctttttcacccgtccgtcttttaatcgggcaagccattccttattctgcatccggcgggtggtacttgtcgctaccactttgtcataagcattcagaccggtaaaacctgccagttgcggcgtggtcatgcagattactctgtctgtcggagtcggaataacggtatagccatcgggtatctcggcttttgttcctttaggaactaaggcgaaaagttcgggtattgcatggttattgttcggctccgagatgtacagaagctttactccatccggacgaacagttattttgaagcctttggcataacggggggccaaggctgtttgtatggtatctgcggaagatagcccgttttcactcactgggttgcggcttttatagccgcaacctgccaggcagaaagttgttatgagcagatagacaagtctggttttagaagccatgctaaaaatagttttattgcttgaaacgaaccagcagactgacatagaaagagcgtcccggtgtcagagttgcataattactgttataaggacggtcatctgtgtaattgaaaatgttttcaactccgacggcgggttccagagcaacagattttaaattgaatgaatggcgtgtgttgatatcccaaagctggtgggcgggggcgtcaccgtaagttttagaccagcgtgtaccttgatagcgtccgttgattgcaatattgaatgtataatcattccatgtttttcgccaactggcattgaaattacccgagtgacgtactgttctttccaaacggatgtcttctgtacggttgcgcccgtccgtgtaaatatagtttgctccgaacatgaagcctgtgaagggacggactgaaaaacctatgtcaaagcctttcacacgtgccttttctatattacggtactggcgtctgcgagtgataccgttttcaatatcttcgggtgttgttcctatatcttccgcttcgatcttgtctttcaggtcattctgataaatggaagcggcaatggagaacaagcgatgattgtattctatattcaaattatagaaattgctcttttccgggtccaggccagggtctccgacagtgatttgtccacggctttcagaaacggcatacatttgttgcaaggtaggtgaacggaatccggcagcgtaagatgcacgtacattcagtcctgaatattggtacatcaaggatagtttgggcgtgaactggcttttaaacttttcattataggcatatcgtatacctgccactacgctgattgcatccagtagttttacttcgtcctgtacgtatgctgccagtgtataaacactttggtattcattattcagcatcttgctggtttcagtcggctccaagccttcgaatacatagtccagtccggtaaaaagtgtattgttctcgtgagttttgaatacaccttttagattggcattggtgtaagtctggtctttactgaggacttcatcaccggttttatgtgtttttgcatcatttatatagtcataaaaagaacggaaattggtggtgcttatattcccttctatatatgaagcccgcttagccaacagatatttggctgttccacccactgtataggactgatgccggttgttgtaatcgtaagctccggtacggtcgttttcgctgataaaaagattaccgtttaaatgaagacttaaacgctctgtggctgcgtagctcaaggtttggctcacattatgcgaatgatttttatagaccggtttctttgtggtttccaccagttctcccttgctttcctcatacggattcagttgccatccatccgaagtgcggtaattatagttcaagtgtgcggataattttccatcattggcgtctgcgttgactgattctgaaattcgtccgtgagaacttacacgggtattggaagatacattcaatgcagatttaggatcatcggtaatgatattgattactcctgcgatggcgtcactgccataaagggcggaagatgctccttttaatacttcaatacgttttacggcatccatattgatccggtcgtaatctatagaccccgaaatatctccggctacttttttaccgttaattaatacgaggaggtatttatcaggcagtccgtttacgtatagggttgttcccatagcggtggtttgcaccgagatagagggaactagtttcaccaaagcatcctggaaactggatggattggcattttgcaggtcacgttgggaaatgacctctacgggtacagggctgtctttcagcttgtggtgagttccggttccggttaccactacctgatccatgttgaaagtggtacctttcagccttatcaccatttctttttgactttgactgactttctgagtaacaggagcataattcaggcaactggtacgcagggtatacgtcccctctttgatgtctttcaacaaaaattctcctttaggattggtagcacatcctattgtagtttgttccaaacgtacgttagcgccttccaccggctttcctgtacgggcatccactacttttccacttaacgatatctgggcggatgcacacaccaccatgctgccgaataaggctgtcagtaaacatttctttttcatcgaaataatttaagaattaataattagctttcctggccccgggaaagcgtgaattatctatgttcagacttggcaggtttcctggcttcaccctgaaaagcgccttcccatttcttacaaaggaaacagtggcatggcgagagttgcttttcattggacgggcttcacagtagcgggcactgcttcggattctataaccgaattcccttttatgcaaatacggaaagtacttacatcaccaaatctgatgcaaaggtagggttttattttaaaatcttttgggattctgaaaataaaagaaacatttttgtgatgtttgatactgatttataggcttcttaatatataaggaagggacaactaaggacgaatgggcattttctttggcaggatgagaggcttgtttccggttttaaatccataactactattaataggtattgactgctattggaaatagttctatctttgtccccgttacgatgaagaaatatttgattcatattctaaagctcttccttccgctgatatttattgcctatttgggagggatcaccctttttactcactcgcatgtggtaaatggggtaatcatcgtacattcgcatccgtttaaaggggagcatcaacatacggaggtggaattggaaacaattttcttcctctcttctttcgctgcttccgatagtttgctcacaccattttccgcatcaatcttattagtattgctatgcttgctggctactccgattgtagaacacattaaaccagcaaaagcttgttgcggcatttatttgcgtgcgcctcctgttgtttattaaataaagaattttcacgttagtagaatgttttccgttgccattatgtgcatacggattcgttcttctgaccgctatccttttattcataaataaacagaacaagaacacatgaagaaatacatttttttcttgatgggagtagtatgctttttactctcgtcactggctgtgcacgccaatgaattgaataagtctgatgcaaatattataggacatgtattagataagagtacgaaagaacatctctcttttatcagtgtatcgctgaaaggaactaccatagggactatgactgacgccagtggacactattttcttaaaaatctgcctgaaggagaatttaccatggaggtaagtgctgtcggttataagacagtcagccggaaagtaactttaagaaaagggaaaactttggaggagaacttcgagatagaagaggatctgatagcgttggatggagtagtggtgtctgccaatcgtagtgagaccacccgccgtatggcacctactttggtaaacgtaatggatgtgaaagtgtttgaaaatacaaattcctctacattgtcgcaagggctgaatttccaacccggagtgcgtgtggaaaataattgtcagaactgtggtttccaacaagtacgtatcaatgggttggatggcccttatacgcagatattgatcgactcgcgtcctatattcagtgctttggccggtgtatatggattggaacagatacctgccaatatgattgagcgtgtagaagtgatgcgcggaggaggttcggcattgttcggctcttcagccattgcgggaaccattaatattatcactaaggagcctgtacggaattcaggacaattgacacataccctgacaggtataggaggtacttcttcttgggacaataatacgacactgaacgcttcattagtgactgataatcataaagcaggattgtatatttttggacagaacagagaaagaagcggttatgacagtgacggagatggatataccgaattgccaaaactgaaaaatcagacagtaggttttcgttcttttattaaaacaagcacgtattcaaaactgacttttgaatatcatcatctcagtgagttccgtcgtggcgggaataagttgaaccgtcctccccatgaagcggatatagccgaacaattgcagcatactatcaatagcgggggagcgaaatttgattatttctctcctgatgagaaacagcggctgagtgtatatgcctctgcacagcatacaggacgcgacagttattatggtggaggacaagatgtgaatgcgtatggcgcgactacggattttacctgggtcacaggatcgcagtatatctatagttttgataaatgcttttttatgcctgccgattttaccggaggtttggaatataaccaggataacttgacggatgatatgtggggatataaccgttataccaaacaagaagtccgtatagccagtgcatttttccaaaatgaatggaagaataagcaatggagttttttacttggaggacgtttggacaaacataatatggtggatcatgtgatctttagtccgcgtgctaatcttcgttacaatccgactgagaatatgaatctgcgtgccagttattctttcggattccgtgcgcctcaggcttttgatgaagatttacatatagaaaatgtaggtgggacagtgtctatgattgaactggcaaaagacttgacagaagaaaaatcacaaagtctgagcatatcgggagatttgtatcatcgttggggagatttccaaggaaacttgcttatagaaggtttttatactttgctttccgatgtatttgccttacgccagataggggagcgtgacggtattattatcaatgaacggtataacgagaagggagccaaagtgtatggtttgactttggaaggaaagattgcttatcgttccttacttcaattgcaggccggcgttaccatgcagaaggctgaatacaagcaggcacgtgcatggagtgatgatgaaacggtgccgatggagaaaaaaatgttccgtactccggatacttatggatatttcactttgtcatacaatcctttcgtaccgatgactattgcattgtccggtacttataccggtagtatgatggtagagcataaagctggttttattgataaggacattgcagtgaatacacctgatttctttgaattgaatctgaaagccggttatgacttcaatttgtataaaggcataaccatgcaagtaaatgccggagtacataatatttttaatgcgtatcaaagtgattttgaccggggggcaaaacgtgattccggttatatttatgggccgggtatgccacgttcttactttgccggagtgaaattgagtttttaatttgtatatatcattgccgggagaggacggatagcgctcctctcccggcaatttgcgtcatagaataaataacctattatagggctttcgaacaggttattttagataataattcttttgatacactttatttagaataattatctaaattggaatgctttattggatgtaaaatctgctattcctatctttgtggagaaataaatctgaaatgtgattaatataaagataaatctcctatataactatccgctatatggatttatcggaattaataagtaaaaaggtcaaaaaagatgggtattgctgagttgataaataaggaaaagaaaacagcattttctttcgaggttcttccaccgttgaaaggtactggaattgaaaaactatatgctacaatagatacattacgggaatttgatcctctttatgtcaacattaccactcatcgcagcgaatatgtgtatcgcgagttggggggtggtttatatgaacgtaatcgttatcggcggcgtccgggtacggtggcggtggctgcggctatacataataaatatgatatcactgttgtgccgcatattttgtgcagtgggttttcacgtgaagacacggaatatatattgcttgatttgcaatttttaggtattactaatctgttggtactccggggagacaaggcaaaagatgaatcttcttttgttcccgagaaaaacggttatgcccatgctttggagttggaagagcagattaatgcttttaatgaaggaaaatttattgatggaacacctattcaggctcctttaactccttttcgttatggtgtggcaggttatccggagaagcatgaggaatctcctaatatagaacaagatttatattggttaaaaaagaaagtggaagccggagccgattatgtagtgacacaaatgttttatgataaccaaaaatacgttgccttcgtggagcgtgcaagaaaagaggggattaatgttcctatcgtaccgggtatcaaacctttttccaaactatcacagcttagcgttattcccaaaacgttcaatgtggatttaccacaggaactggtcgtggaagcaataaaatgcaaggatgataaagaagcgcgtgcattaggcatagagtggtgtgtcaatcaatgccgggaactgatagcatatggagttccgggaatacatttttatacagtgggtgcggtggagaatgtgaaagaggtggcggcagctgtttattgatagtctttaatggaaatgtttctgtcaggccatttattgctccgtatcttaatgggtttaagatgcggagcaaaatatattttgtaaatgggttataagtcatcttccaaagctgtacttttggcataagccgtactctttgcttcaaaaaaatcagtctttaccatattggcattagaatattgagatacccagtgcatgctttccggctctttatggttttcttcgtacagagggccaaaacctaaactactccaacggagattgcctaaatattgaatataatcttctatcattttccggttgagtccctgtatattgtctcctatcacatattgtccccattctatttcctgcttgaccccctcacgcatcatgtattcatatatttttactttatcgggagtgaataaatccggttcttctttctttaattccagaataatgttgcggaataaccacagatgcgtgttttcatctcgattgatatatcggatttcttgtgcggaacctgacatttttccattacggctcaagttatagaaaaacatgaatccgctatagaaatagattccttccaatatataattggcgataagggttttcatcaatgtgaatccatcctgactttcctggaattcgttatagcaattgcctataaaagtatttcttttcagcaggtgttcgtctgtcttccattggtaaaggatctcgttacgcttttcggggctacagatagaatccagcatgtaactgtagctttggctgtgtacacattcctgaaaggcttggatatggaggcatagattaacttcattggctgtgatgtattcgctgatggtgggcagattattgctttgcaaagaatcaaggaacactaaaaaactcaggattttatcataggcggtgcgttctgcctggtccaggtgaggataatccttggtatcttgggtgagattgatttcttcgggaatccaaaaattattcatagcctgacgataccagtcactaacccatttatagcgcatattattgaaatcattcaaattggtggtgtttcctccaatcattcttctgtgccggaggtcggtatctccctcaggattgaaaagggcattcttttttaattttattgtattcatgatttattgttgttttatattctgtcttcttgttttactgctaactcaaggctgtatattaaaaataaatttgttattcattccttgtaggggcgcaatacttgcgcccctacaaggaatgttttagcatgacaattcagtactggagtgtttacgaaaagatcaggaggcacagctttcacattcttctacttccaacgatttgctacggacataatatattgtttttacgccacattcccatgccagcaaatacaggtttaatacttgtctcagggtaaattcattggtaatgtatagattcagactttgcgcctggtctatatgtaactgccggatccctgcggcacggatactccatgtctgatctatcagataagcacttttatatatccaataggtcttatcggacaatgccggtgcaacacgtggcagcatggctcctttcttttcttccaagaagaaacgtttcattaccggatctgttccggcagtggttccggcaatgatactggtgctgctggtgggggcaatggcaagaagataggcatttctcattccttgtgtggaaacttttacagccaatgctttccattctggcgaattgtagccccgttttataaaataaactccggtctgccagtcgctaccttcaaaataatgataggatcctttttcttttgccagttcgctacttgctgctatagcagcatagttgatacgttcgaaaactttatccataaaattgagatgttcctcgctttcccaacgaataccgcgaacagcaagagcatgatgataaccgctgactcccaagccgatactgcggtagcgatgattggtaatctgagcgaaaggaatcggataaaagttcagttcaatcacattatccaatgcccgtactacagttgccaccttttctttcatttgtttttcatcttccaagggcaaatgtcctaatgaaaggctggcaagattacataccacaaagtctccgggccggatagttttgactaccactgtatcaccatcttccgtacatatctctgtagagactgtttcaatggaggacatgttttgtgctatttccgtgcaaagattggagcaataaatgatcccccggtgtgcattgggattggcacggttcacggtgtcacgattgaatgtaaagggagtacctgtttctacagccgaacgtagtaccagtctgacgatatctttgatgctcatacagcgcttggagagtcgggagtcatttacgcaatccatgtatttctgttcccattcctttccgtagtagtcttccagacagtatcctttgacggtcattatttcattgggacagaataaataccattgctggtttaaatcctgtttcgccatacgccagaataagtccggatagcatacggcagggaagatgtcgtgcgctttcatccggtcatctccattattggtccggagttgcagaaactcaggcaagtctttgtgccatacatccagatagacggctacggctccctgacgcatacctaactggtcaacggctacagcagtgtcattcaccagtttcatccatcggattacacctccggccacacctttgaatccgcgtatgtttccacctgcggcacgaactttgccaaaatacattcccattcctcctccaaatttgcttaccatcgcaaaattgtctaaactgcggtaaatgccttccagactatcgggcactgtatcaatgaagcaactggataactggtgataaggttttcgggcatttgccagggtaggagtggccattgtgacttccaaacgacttaatatatcatagaacttttttacccattgcagtctgtcctgtttttcgggcatagcgagatgaagggcaatccctaaatacatttcctgcacagattccataggctcgtgtgaacgggtacggatcagataacgcttggcaagcagatccagtcctgaataattgaaaagcttgtcacgttcaggacacatgaagccagctgccgtttctatctcttgtggagtataggaggctaagatataattaccatacaaaccctcatcggtgaggtaacgtaatttatcataaaatgaaaagatgccggcagcttccgcctgttcggtcagtttttttgttaataggaaattcagcagacgcgccgcaatgaattcccaatcgggagtttcttgtgtcgtcagttctacagccgctttgacaagtgccgccaaccgttccccgggtgtcatatccggtttacagaaacttgtgaatttctctacgagaagggttagactatattccttcccggagaagtctttttgtatctcttttagtatatttgatatagtatcatcaccggttccagtaatgatttggctaagagcttttcttctttctgtgcgttgccaacggtaaagtatatagtttttggcttctgcataaaagccatgttccatcaaactacgttccacttcgtcctgaatgcgttctacactacgatttgcttcgttttgatgcagaaatagttccacttcgtctactatggtgtagacagcttcatctgttatttctttttgggtactggcaaagcttttccgtatggcaacggctattttttctctgtcgtaggattctgttgccccattccttttaattatttgcatgagatgctgttggtatgaattattgtatcttttcgtaccgcttccctaaccccacgagtagaaacggcctttgatgaatggcaggtcttctgactggctcctcatttccgatgccttcctgcgttctcgttatgtggagtcaggcagtggcaataggtacatatcggaaattttatcggagtttcacagcagcgggactgtccgggatttacacccgattcccttttaatccggatagaggacatctattcggaaccgattcgggaacaaagataatggaaattggaattattacagcattgagttagtttaaaaatcagaaatgatttataaaagttggatggtattaaacattttggacaagttctactaccatgcttccaagcagcacagctactattgttatgagtaaccaattgatatacttgcttttcgatctcgttttttctttttctgaatgacactgatttttaccatataaccgaatgattccccaatgcgattggcactgcgtatcactcgtgaagtatgtacaccacatcccatcatgtgagcggaatattcagaaataaatccactgacatctatcaaagtttcggctgtcttatccatttaaatgaagttatgtttttctttttttagaatccatagacacgacatggctttccagtggaaggcatttccttgtcaatttcaatctttaatttttttatattcaatatttcttctccttcaagcatcaggcacataataagaaaacaaccgtttttctcacattccatatcgaataaccggtgttgtgaaaacatgcctaacccatgtgagtcaataagaataaactttggatggttataaagtaatgcagccagagagtcccaattaagcttcatgtcaaacataaagaagtctttggttgcatagtcgttggttgccatattgccggtatataaaaccaatgctttaccttctatgtccaagttattaaagtattcgtcggctggtaatccgttccgacaatctaccacgacggcatctgttacatattctttatagcggggagcttccatatagcaatccatgtgggtgccgatgtgtccgaggcgttccgtttctttggcatcaagttcgaactgtgccaaatcttcatcacttaactgtaaatgtagttctttggtaatcgtttcttgttggtacatatttaaagaattttaaagtttaacctaatgagagtatcaataattgagccgtaagtacgcgtaggaacatagcaagcggatatacggtggcatatcccacggccggagcgtcacatgaagtcagatcattggaataggcgagggcaggcggattagtatttgctcctgataatacaccaataagggtataatagtttaatttacaggcataacgcccaatgagccccgttatgattaatggtacggtcgtaataatagctccatacataatccaaatatatccaccttcatttacaattgtctctataaaatctttcccggctcccaaccctacacaagctaggaataaggaaatcccgatttctcttatcatcaagttagcactcatcgtggtgtatgtaatcattttatattgaggaccgaaacgactgataagaatggatacaataagcggtccacctgctagaccaagttttactggttgtggaatacctggaaacataaatggaatacttcccaagatacatcctaatgcgatgccgaaaaaaatggggataagattgggatgattcagtctcttcatggagtttcccaaaaccttttcggcatgagtgacagcaagttcactaccaactatagttacacggtcgcccatttgcaactgtaaatgtggggaggctaccaagtctactcctgaacggttgatacgggtgatgctcgcaccgaagttatttcgtatcttaagttgtgagagcatttttccatttaactcaggctttgttatcaaaatgcggcgtgagataagtttcttgtttaactgttcccattccatttctacctgtttgccaaaaaatactgtaatcgcttcaatgtcaatagggttcgagataaccagaatcttgtcatcaatatgtaatatcgtttctgaatttactagttccacttcctgttgtccgtcatgatggcgtatgcgcgaaatgacgaagttgcggtttaccaaaggacgtatttccttaatggtcttcccatgtattgcttcattttttatctctaatgtaacggggcgtacggtcagttcctgtaaatgtcccaatcctttttcggcatcgacttcttcttgtgatgttttgatattaagaatgtatttcagtgcaagcaatgagagaatggcaccaaccacccccaagggataggcaacagcatatcccatcgcaatctccggtgcatctatgccatttaaatcactatttgcctgttgggcggcaccaaggccgggagtattggtaacagcaccagagagaatgccgaccatggtggttatgggagttccggtagtaaaatgtaaaatgatagtaatgactacactgataaaaatagcccccatagccaacatgttcagcgtaaatcctcctttcttaaaggctgagaagaaaccgggacccacctgcaaaccaatggaatagacgaacaaaataagaccgaattcttttagaaaatgtagcaggtgttcatccagattcagattgaaatggccgaatacgataccgacaaaaagaatccatgtgacaccaagtgagatgccggatatttttattttacccagcataattccaaaggcgataactagtgacagaatgagtacggagtgtgctacacctccgccccaaagattgggatatccttcaaagaggtttttaagaagttccatagtattaagaaatatatttatttttaactaagtcatcattttatatttaaaatttcccatcatgtgggttggtaaaagtatccccggaaaaatcacttctgcggggatacacacacattgaacaattacaacggcatattgccgtgctttttaggcggattgctttggtttttgttgtgacacatttccaaagcctgaatgagtttatagcgggtgtcacggggcataatcacttcatcaatcaagccgcgttctgccgcacaataagggttagagaatttatcttcgtaatctttgattatttcttgtttttcttcaggagtggatttccgatagaggatatttacagctcccgcagctcccataacggctatttccgcctgtggataagccaggttcacatcggctcccgtcggtttgctggacatgacaatgtaggcacctccgtaagctttacgggtaattaaagttactttgggcactgtagcttcggcgtatgcataaactatcttcgcaccgtggcggatgatgccgttgtgttcctgtattgttccgggcaggaagccgggaacatcctcgaaagtgatcagaggaatgttaaagcagtcgcagaaacggataaaacgggcagccttgtcactggcgtcaatgtcaaggacgccggccagccaggcgggctgattggcaacaatacctacggaacgacctcccaggcgaccgaaccccaccaccacatttttagcaaagtgaggcatcacctcgaagaaatactggttatccagcaccggttcgatgatatcctttatatcataaggcatattcggatcttcgggaatgacagtctgcaacgcctccacctgacgatggatgtcatcgttgcagggaaccaacggcgcatcctccatattgttggaaggcaggaaactcagcaattcgcggatactcatcagcgtttcctcctcattgtcgcacataaaatgggtcacaccgcttttgctgctgtgggtataggcaccgcccagttcctccttgcccacctcctcgttagtcacagtcttcaccacatccgggccggtgatgaacatgtggctcttctcttttaccataaagataaaatcggttagtgctggtgagtagcaggctcctccggcacaaggacccaagatggcggaaatctgcgggataacacctgaggcgatagtgttctgatagaaaatagaggcatatccggcaaggctgttcaccccttcttggatgcgtgcgcctcccgaatcgttcaaagcgataacgggagctcccgtcttcaaagccagttgctgaacctttacaatcttggcagcattggtctcgctcagcgagccgccatgtgcggtaaaatcatatgcataaacaaacaccggacggccgtctatctttccgtaaccggtgaccataccatctccggcaatctgcttcttctccatgccgaagttggtacaacggtggttcaccagcttgtccagttcattgaacgtacctttgtccagcaacattccgatacgctcgcgagcggtcatcttcccttgggcgtgttgtttctcgatcttgtccacaccgccgcccagcgacgcgcgtttgtccagctcttcaaaccggctgtatatttcttctcttgtcatgatcaatcttcttttattatatccaatactattaatacctggttagcattgacggaatccccttcattgaccaggatatcccttaccgtgcagtccgaggtcactttgtagttgctctgcatcttcatggcctccagcactaccacaatatccccggatgacagacggtctcctttccggacgggaatttttacaacctttccgggcatgggagctacaatcttgtcatcctgtctctcctcgccgccctttttcatacgcagatacttggtctgggtgtccactatgtccacatgataggaacggtagaacatattcacatcataactctttccaccctccccacggatcagttcggcattgaaggaattgccatcgtgcaggatggaacagcttccgttctcggccataacgatatccacatcatacggttttccgtcaatcataaactgtaccttgtttccttccttgctcaccaacgtcacatcggctacgcggtctccaatatgtatttccatacttttgcttaattaaatgaagaatcagattctcaatactcctttctgcaagccgaactcacgccagcggctgatgggacgggcatcagacagctggggactcttgttctcttccagattcatcagatagtcaatataagaggcgatcatggcgatattctcaatctcctcattattaccgttgccacggagcagcatacgcgagttcttctctatgaacaaggtattatactcaccctttacaaagtcgggggtatgcatgatgcgtttcagataactgaggttggtcttcagccccgtaatcttgtactcgtaaagtacccggcgcatacgttctatggcatattggcgggtcgtagcccatacaatcagcttgcctatcatcgggtcgtaatagatgggaatctcgtaaccttcgtaaacgtagctgtcaatgcgtacgccgatgccgttaggctccgtcagctgtttgatgatacccggcgaaggcatgaagttgttctccgtgtcttccgcacagatacgacattcgatggcatgaccgcgctggaaaagttcttcttgcttcaggtgcagcacctcgttattggctatacggatttgttcttttaccagatccacgcccaccacttcttcggtgatgggatgctccacctgcaaacgggtgttcatctccagaaaatagaaatcgcggttcttgtccaccagaaactcgatagttccggctcccgaatagttcaccgccctggcggcagccactgccttttcccccatctcctggcggagttccggagtaaggaacggagacgggctctcctctacaatcttctggttgcgacgctggacagaacactcgcggtcaaacagatggattacattgccatgattgtcacccagaatttgaaattctatatgatggggttcctccacaaatttttccagataaaccgtatcatccccgaaagaagacatggactcggaacgggcggtgttatatgcctccaccacttcgtcttcactgtgtatcagcctcatccctttaccgccgcctcccatagaagccttcagcatgacaggatagcctattgcattacagatacgtaccgcctcttcggcactttgcaacggttgttccgtaccggggaccacgggaacgcctgcggcaatcatacgcttacgggcggcaatcttgtcacccatcgcttccatcgtctcggcggaagggccgataaagatgatcccctcctctttgcatcggcgggcaaaatcagcattctcggacaaaaaaccataaccgggatgaatggcatcggctttgcatcgtttggcagtctctattactttttctatatttaaatagctttccctggctatagcaggacctataagataggcctcgtcagcatacatcacatgatgagaagtgcggtcggcttctgaaaagacagcaacggtccgtatgcccatttctcggcaggaacgcattacacgtaaggctatttcacctctgtttgcaatcaatactttctttatcatttttcttcttattataacgggggttaatttcgcaggcatagaaactgtccttgacggctttcaggcagtcatggcacaggcaatcggaataattctccattaaataggtgcgttgcagagcatccagtcggacagttgcgcaatgacacgataaaatatcattgtgcatacaatcaaatgttgcaccacaacgtggacatacctttttcataggcattcctcccgtaaattttttattttcttattttctttcgtactgctttcctaatcccacgagtaaaaacagcctttaatgaatggcaggtcttctgactgactccttatcttgaagccttcccgatgtgaggattgtcacatcagtggcaaaggtatttttcaagattccagcagagcttcacagcagcgggactgtccgggatttgcacccgattcccttttaatccgaatagcagatagactatccgaaaccaattcggggcaaagataatggattttataattaaacgaagcggaaaagatgaaaaaagtgttgcttgaagttttttttctttttccagttgttttattgatttaattcctaactttgtcagtaatatcggtttccggattagccgttggcgcgaaacggaattaaaagggaatcctgtgcaaatcaggaactatccccgtagctgtaagttttatcctcccatagtgtggggaagtgttgtgacattcttagccactggttattgtgaaaaccgggaaggcgctacaacggaaacaagtcagaagacctgccgttattgtttatatcattcatggctttcgggtgaaaggcgatagaacgaatcatactgatcctttttattactggtttccatgaattgtcgtgtgtgaaagacttatattgaataatgtgtgttttgtataaccttaatttataagtatgattaattcagaggtatttattattaagagagatggtaaaaaagaaactttctctcttgataaaattaaaaatgcaatagccaaagcatttttgtcagtaggaagttttgctacccaggatgtgattactactgtattgagtcgcgttagtgtcagtgatggaatgaatgtggaagaaatccagaatcaggtggaggtggccctgatggctgaacattattacagtgttgccaaggcgtatatgctgtatcgtcagaaacatttggaggatcgtgaggtgagagataaactgaagtttttgcttgactattgtgacgcttccaatccggcaaccggcagtaaatatgatgcgaatgccaatgtggagaataagaatattgctacgctgataggagagttacccaaatcaaattttattcgtctcaaccgtcgtctgttgactgaccgtttgaaagacatgtatggaaaggaattgtccgatcgttatttggaacttctgaatcatcattttatttataaaaatgatgaaactaatctggctaattattgtgccagcattactatgtatccttggttgaataatggtacgatagcagtgggagggaactctacggctcctactaacttgaaatctttttgtggtggatttgtcaatatggtttttattgtatccagtatgttaagtggtgcctgtgctactccagagtttttgatgtatatgaattatttcattggtttggaatatgggcaggaatattataagtatcccgataagattgttgatttatctaccaaacaaagaacaatagacaaaatcattacagactgtttcgagcaaatagtatattctattaaccagcctacaggggcgcgtaattttcaagccgtcttttggaatgtagcttactatgacaaatattattttgaaagtctttttggtaacttcttttttcccgatggaagccaacctgactggaattcactaagttggttgcagaaacgtttcatgaaatggtttaataaagagcgtacacgtactgttttaacatttcctgtagaaacaatggcgcttttgactaaagatggtgatgtattagataaggaatatggtgactttacggctgaaatgtattccgaaggtcattctttctttacttatatgagtgataatgcagattctttaagtagttgctgccgtcttcgcaatgagatacaggacaatggtttcagctatactttgggagcaggtggggtttctacaggctcaaaaagtgtgctgactattaatttgaaccgttgcatccagcatgcggtgaaatccggtatactttatccgttttttttggaagaagtggttgatttggtacacaaagtccagttggcttataatgagaatctgaaattgttgcagtcgaaaggtatgctgcctttgtttgatgctggttacatcaatatgaaccgtcagtatctaactatcggtgttaatggtttggtggaagcagcgcaatttatgggtattgaaatcaatgataaccctaagtatgaagcgtttgttcaggagattttaggaatgattgaacgatataataggaagtaccgtacaaaagatgttttgtttaattgtgaaatgattcctgctgagaatgtaggagtgaagcacgctaaatgggataaagaagcaggcttccaaacattccgagaatgttataacagttatttctatattgtagaagacaaatcgttgaatgttgtcgataaattccgtctgcatggacgccgctatataaagcatttaacgggaggctcggccttgcacatgaatttggaagaacatcttagtaaggagcagtacagacaactacttcgggtagctgctatagaaggctgtaattactttacatttaatataccgaataccatttgcaatgaatgtaagcatattgataagagatacttgcatgaatgtcctgaatgtcatagtcggaatgtggattatctgacacgtgttatcgggtatatgaagcggatcagtaatttttctcaggcaaggcagaaggaggctgcacaaagatattatgctccgttacgttgattatgacatcgtatttcaagaaattccggatgaagtcactctggcgatcaatctctctaactgtcccaataggtgcaagggctgtcatagccctcatttgttggaaaatgtaggagaatctttaacggaagaaagtcttgggcatcttttacagaagtatggaaaggcggtgacttgcgtctgttttatgggaggcgatgccgaaccctttgaagtggaaaggttggcaggatttcttcaccgacagtctatcgctttggtaaaggtgggttggtattcggggaagaatgaattgccggaaggtctttccgttcagaactttgaatatataaagttgggaccgtatattgaaaaattgggtggcttgaaatctcctgataccaatcagcatttctatcggatatacggggatgagatgaaagatattacctatcggttttggcgtatctgaaaaaggcggaaataaattccgcctttttcagataaatatattaagttggttatgcttccggttgatagtcttcaccattctcccatgcactgtcgtcattccagttttcatataaatggtttacccaaatttggcgaatctcaggataactgccaagggctttcatattacatccgtctttaataccatgatcagctccggcttgatctatcgggtggctttcgaatgttctgtccactttgaatcctaatttctccaaacgttcacgccagctatattcatttgtattgatttccacattacttacatcgtcatcttcggccatagcttccagtccccaaaggtcgttgtgggcatggtcaccggcaattgacatgaaaggtgcaagataaacatttacttctgatgggttcaggccgttcttttcgcaatagctcatcaccttagagtacatacagtcgggatattgggttttgtcaaatccttctacaggaattctattagccggttcttcctctatttctttcgggaagaaaagcatgtcaccataatccacagtacctacaaagatattgttgttggcagcaagttcctgcaatgctttttccatgtcagagtactttttgttagcattgtaattctcatccggattaccgtgtcccattagaagcacgatgttgttcttgcctgctaatttagactcatagtgtttgtaaagtatctctgctacatctttagtatcttctgcatcggaaagaaggttggcacctttcaatacatcaatatgcggataccattgaatcataaagtatttttttacatcagtattcattaatgaaagatattcttcgcctggaattacatgcaatgattgtacagccacacgtttgtatcctgcatcgcctattgctttcaaccattggtccaattcataacgtgctatgccggtagatgcttctacacgtccgatacatgtacgtgaagtaaatgacatataaatatccgtattggggaatttagctttaaaatcctcaatcacatcatcataaacagaaagggactcattataggtactgccaaaagtacagagcaaaatggctgtgtcgtgttgcttggttctggttactacatccacagcaggattaacagtactttcttcatcatcattgtcactacaggaactgaatcctgtgcaagttgcggcagcaacaaaagccgccatcagataatacttgaattgtttcatattaataaaaattaatttataaattgtcggttattaattgtttttgaatttaatgagggcggagacataaaaagttcttccgggagttgatgtggcacgattccgtccgaaaggagtacggtctacatagtcaaatacattatctaccccggcattcatcgttaatgaccaccgtttcatttttaataatgagtgggctgtgttgatacgccaagtttggaatccgtcggcattattatcatttatataacggcgtgtagactgatatctgccatagatgccgatacccaaacgatacagtttccatgaatgttgccataagatatttaaatttgcattatggctggaagtagcatcaataggaagatatttcatataatctatacctttgttaggatattgcgcttttggatcagcataactatatccgccggcaaggctgagagattttgcaggacgatagttgaaggtgaaatccataccataaatacgtgcctttgtcagattcttatattgtttgctcttttctacttcaagaaacttttcatcgggagttacggaaatttcaaccaactcaatcatgttgtgaagataattcatgtatccggttaaactggcttggaatttttgccctacgtactcgataccgattgaagcatattgtgaggtttgtgcttttagatttgtgttgccatgatatgcagtcaaggcaccgcctccgataacgccggtataattataataaagttctttaatagtgggtgctttgtagcctaaagcataagaagcacgcaaattaatatgttctccgggtttataaagtcctgatattttcggactgaaattcaatcctgtttccttgtgttgtgttcctcgtaccccggcagtcagaaccagattttctctggctgtccattcctcctgtatataagctgccaacgtataaacggaagcgcggtcaccgtcaatgtgatgaggtgattccaaatgattgtactgatattcgattcctgcatttaaaatatggtcctctccaagataaaatacactttttacctggcctaatatttgtttctgaatactttgtttgatacgttgaccggcaaagtaggtgatacgttcatggcggtcattgtctagaaaataatcagtatgctcgtttagcttatagtcatagaagtaaccgtatctgccatacgagaggtctgcagtcagataattccgttttcctaatttatatttacttcctactgcaaatgtatagttgcgataataaaaatcgttggcttgatatttccaaggaccgtgtgtacgcattacccaacgctcataataagtgccttctgcagtgaggtctagtttgcgattgacttgccattcaatgttctcggacagggtatagtttgaagaacggtttacggtcaacatagtagagccggatttcaattgattctgatcccactgcaggtctgtattccgccagccatcggtatgccggaagttgattccggttacagattttatctttccataattaaagccgaaactggtactttgacgtatatcaccatattcacctatgcgggatgtattggtgagctccattttttcacggttacgtttggttatgatattgataactccggctattgcgtcactgccataaagtgaagaagcggccccttttacaatctctatgcgttctatattagctggatttaattgattcaagtcgttttgccctcctacatcgccattcattctttttccatttatcatgatcaggatatagtcattgttcaatccgtttagttggatatggctccccatatcaccatcatgaaaggtcaatgaaggactaagaccactgagcaaatcgtctatactgcgtgcctgatattgttccaaagctttgctggttattacttcagtctgtacgggagcatctttcagataatgttcagtacctgtacccgtgatgaccacttcattcagtaatacggacaattctttatcgtctttatctttgagaatactttgggcacttgcaatttgtgtacctaatagtagaatagcaggaagtaaatacctcatattgtgttttatttaatttgcaaaataaaacatcaagtttccctctgataaagaggaatgccacaaaggaatagacgttggaaaacgcttgttcgaatggacacatacttctaatcctggaagcttggtgtttattgttcaacagacttagcaggtattctggctttcctctgattggaaaccttcccatttcttcaaatgaaacagtggttttggactatccaatcaacataatgaggatttacagctgcaggtacagccccggatttacaccggattcccttgcatcgggctatgtgatagcccgattactaattctgttgcaaagatataggtttattttatattatcttcgataagtctttgatttttttagcttttaaattttaaagacaaactgatatagaatgatcgtccgggggtaagagttgcataattgctgttataaggacgatcatccgtataatcgaacaggttttctatgccacatccgggttctatgattacagattttaagttgaaagaatggcgtgtgtttaaatcccacaattgatagtcgggagcatagccataacttttagagaaacgtttgctgttgatacgaccgttcaaatttatgttcaaccgatatatcttccatgaatgcgcccattgggcattgatattgtatgcgtttttaatacttttgtcgatgggttgttccaattccacgtcttgggtattaagatgagtatatcctccgcttaaattgaacccggcacctaggtatgcattggcggatacattgattccgtatactttagcctccgctatattatcacgttgacgaacttccttatgaccatattgctccatagctttatctcccgtggcaatcgtattataatctatcatgtcacgaatattattataaaaagcattgactgatacagaaaaacgctcatgtacatactctgcactcaatgagaaataatcattcttttccggctttaaatccaaattgcctattgttaacctgtcattttttttagctatgtcagtggcatagagttcagacagggtaggagttcggaaacctgctgcataggaggcacggaaattgaatttgccgggtttatacatcagtgctacattgggagtggcatgatttttgaaattttcatgataaatgtaacgtacaccgatcaaagcctgtagatttctcagtaactttatttcatcttgtgcaaacaaggccagtgtataagcatcttctttagctatattgtctgtttgacttttcaagacatcaacgatatattctgtgccgactgaaagtttgtgccggccacctaatttaaagataccttttatgctaagattgtgattgcgggtccgtttgcgcacttgctcttcacctgcttttccattataagttttattgtctttaaaaaaacaataagaggaagaaaaatgatcggcgtaatagtctgcggtaatataattccctttacttatcatgtattgggtaccaataccataattaaaggtttcatgcaatatgttgtagtcgtatgcttcataagggcggcgtgtcttgttgtcataatatccgccgcgggcataaaaggagagtttgtcggtagcatcaaaagtgaatttttgattgacagtatttgcatagaatcctgtagaagctactttcccggtttcttccagttcatgagttttggagttctcttcgtatggattcagttgccatccctcggcctgctgacggcggtaagaggtgtaggagccgaacttgccggtattgacatctgcgtttacggactgggtaaaacgtcctttactggcataacgggtatcgctggaaacattgatagcattttttgcatcatcagtaataatgttgattactcctccgatagcatttgttccgtaaagagcggaagaggcaccgttcaatatttcaatacgtttgattttggcaacattgattcgggcgtaagtatcatctccatacaggcgtttgccattttccagaaaaatgaaataatcatcaggcaatccattcagactcaatgttgtacccataccgttggtcatacttgagaaagatggggtcagcttttgtaaggcctcgtccagcgatgttacactggcattacttaaatcctttgcggtgataacggaaacaggcacgggactatccgtcatgcggtggtgtgttcctgttccggttactactacctggcctatattggtaaaactgtcttgtagcttgataagaagatttttttcacccccttttgtggtgacagatttgggtgtgtaactgacatgcgtgattcttaatacatgttttccatcaggaagattgttgatattaaactcgcctttaccatttgtggtgcatcctgaaaggctttggtcaatacgaatattagcccccactacaggttcgttggtatcggcactcacaatctttccactgatactgacttgtgccagtacgtcaatagccagacagcttaaagtaattgctgtcaataataattttactttcatcgaaagaatttaagaattaataattggctttcctgaccccgggagagcgtgattatctatgttttgatttggcaggtttcctggcttcaccctgaaaagcgccttcccatttcttcattttcgaaacagtggcatagcgagagttgcttttcatcaaatgggtttcacagtagcgggcactgcttcggattccacaaccgaattcccttttatacagatagagaaaaaatatctgtatcaccaaaccgggcgcaaaggtagacaattattttatatatgttttaagattagtgaaaaaatgactgcttaaaacggagagaatattgaaaagaggaggggattttgaaccgtagaagtgaatttgattcactcctacggcaatatgaatttgcaataattcggatagtgatttcaggcaagcgccaatattaatatttgtgctgtaagcacacgtaaaaacatggtgagcggataaacggtggcataacctactgccggagcgtcacaagaggtcaaatcattggagtaggctaatgcgggcggattggtggtggctccggacaatactccgatcaaggtgtaatagttcagtttataaacatatcgtcctattattcctacaatcagtaaaggcagcagcgtaataatggcgccgtatgctatccatacatatccgccttcgttaataattgtttcgatgaatcctttaccggctcctaatcctacgcaagcaaggaaaagtgagataccgatttcacgtaccatcaaattggcacttatggtggtataggttatcaatttataatgtggtccgaaacggcttatcaggatggacacaataagggggcctcctgccagtcccagttttaccggttgagggataccggggaataaaaaaggagtgcttcctaaaatacaccctaatgcgatgcctaagaaaataggaatcaggttgggatgattcaaacgtttcatggaattacctagaatcttttcggcatgggctacagccagttcgctacccacaatctttacccggtcacccatttgcaattgcaggttgggagtggccacaaggtctacacccgaacggtttacacgggtaatgcttgctccgaagttattcctgatttttagttgagccaatgtcttgccattcaattcaggcttggtgatcagaatttttctggaaataagttgtttgttctggaaatcccattccacattcacttgttttccaaaaaatacagtgatagcttctacatctatcggattggcgataacaaggatttcatcgtgcatgtgaaatactgtagtggagttcactagttctgtttgtttgtctccgtcacaatgccgtatgcgtgaaatcacaaaatcacgattcaccaatggcttgatttcttttattgttttaccttctacggcttcattgcgtatttctagtgagatagggcgtacggtcagttcttgtagatgtcccaatccccgttccgcatcggcttcttcggtttttgtgttgatgcgcagggtatatttcaatgccagcagggagagaatacatcctactacacccagtggataggctacggcatatcccagtgctatttcgggagcgtctataccattcagatcactgtttgcttgctgtgcggcacctagtcccggggtatttgttacagcacccgaaagaattcctaccattgtggtaatggggacacctgttatgaaatggagtataatggtgatggtcacacctaaaaatacaaccatcatggcaagcaggtttagtgtgaatcctccttttttgaatgctgagaagaaaccgggacccacttgtagtccgactgagtagacaaataatatcagaccgaactcttttaagaaatgcaacagatgttcgtccaggttcagattgaaatgaccgaatacaattcctacaaaaagtatccaggttactcccaatgagatacctgccacttttatttttcctaacatgataccgaaagcaatgaccagtgaaagaataagtacggaatgtgctactccgccgccccataaattagggtacccttcaaagagatttctaaaaagttccataattcattatctagtttaattatttatagtatcaattttataattcaaaaagttgtctttcaaaatattagagtaggttttatgggataggatgcttcgttttatagctgtcatcccggcaaaatgactgcaaaggtagcttatttaattgataaaccataaaactttaattgctttctaaggatatttacttgatatgtcggaattatgaattaatctgttattctaatttcgataatttgcaatttgcactatctttgtatccgtttttaaaagaaatactaaagaatgaagccacaattactcataggggccgctacatcgggaagcggaaaaacgacttttacgatggggttgctgcgggcattgcacaaacgaggcctgcgagtacagccttttaaatgtggtcctgattatattgatacacaatttcatacgctggctgctgaccatgagtcggtgaatttggatatttggatggcatcaaatacccatgtacaacatctgtataataaatatggagatggagccgatgtatgtgtaaccgaaggagtgatgggattgttcgacggttatcaaagaatgcagggaagtagtgctgaaatagccagattgttgaatatccctgtagtgcttatagtaagtgcgcgttctacagcttattctgtggctccgttaatttatggtttcaagcattttaatccggctgtgaagattgcaggtattgttttcaatcaagtatcatctccttctcatttcgcttatttacgtgaggcttgtgttgatgcaggagtagagtgtttgggatatctgcctatgacagaagggttgaaaattccatcccggcatttgggtttgacattgacagccaaacgttccatgaacaccttaatagaacaggctgcggaattggttgagaaatatgtggatttggataagctgctgagtatttgtcatcgtaatttcccgtgtcggtatacattgccttatagttctgagataggggtggaaagttttgctccttctgctaaaaagatgaagatagccatagcgcgggatccggctttcaactttatctatagagaaaacatagaccgcttgtctgcgctaggaagcattacttatttcagtcctgtatatggtagtgatttgccggatgctgatttggtttatttacccggaggatatccggaattgtttgcccgtcaactgcatcggcgcaaaaagttaatggaagcattaagaacctatgcagaggagggggggaagattttggccgagtgtggaggtatgatgtttctcacccgttccctgacagtccgccaaggagggactgcatatgccatgacgggtattttgcctttggattgtaccatggtgggtgccagacttcatctaggatatcgccgtatagaatataaagggatggagcttcgcgggcacgaatttcattattccaatgtcgttgctcctgatgctatgccttctgtagcaaaacaatttacggcaagaggaatggaagtgagtaccccgctttatagatataaaaatgtgatagccgggtatacccatttatattggggagaaacggatatattaaaattatgggaagtatgaggcgcatttatacacgtaccggggataagggcatgacagggattcatggtggagaacggatacctaaggatgatatccgtatcgaggctaatggatgtatcgatgaattgaatgctgttataggaataatacgttcacttttgtcgcaggagcacgaatggcaatccttgctttttacgattcagaaaaatataatggtagtgatgagccatgtggccacaccatcggcccttcgtgatgggaatcccaatattttgcctgataatttatgctctttttgtgaggaggcaatggacaagttgatggaacaaatggaggataatggttattttattcttcccggaggaacacctgtatcggcacagttgcaatttgcaaggactgtggcacgtcgggcagaacggagattatggactttgcataaacacgatccgttaccggaaatcatacttcggtttatcaaccggctgtccgatttattttttgttatggcccgttatgagatgcaacagcagaactggacggaagaaaagtggcagtcctttgcctataaaagaaaaaagaaagagtgatgaaaaagaaattacaccccattatgttggcgggaacaggtagtgacgttggtaaaagtgttattgccgccgcattatgccgcatttttaaacaggatggttatcaaccggcacctttcaaggcacaaaatatggcattgaattcgtatgccactccggaaggattggaaataggccgtgcacaggctgtacaggctgaagctgccggagttccttgtcacacggacatgaatcctctgttattgaaacccagctccgatcatacttcgcaagtggtgttaaacggtcgtcccatcggtaatcgtaacgcttttgattattttcgcaaggaggggcgtgaagaactgaggcaagaggtaaacgcagcctttgaccgtcttgccgcacgttataaccctattgtaatggagggagcagggagcatttccgaaataaatctgcgggatactgatttggtgaatatgccgatggcctgttatgcggatgcggatgtgattttggtagctgatattgaccggggaggagtatttgccagtgtctatggttcggtcatgttacaaactactgaggacaagaaacgtataaaaggaataatcattaataaattcagaggggatatccgtttgtttgagcctggtgtgaagatgatggaagatttatgtggtattcctgtcttgggagtaataccttattatagaaatatacatattgaggaagaggattccgtagtcttggactataaacggatgcaagcagtggaaggcaaaataaacatagcagttgttctgttgcgtcatctctcaaactttacagatttcaacagattggaacgggatgaacgagtgcacctttattatactaataatacggaagatctggccaaagctgatattattctgcttcctggcagcaaaagcactttggatgacttgtatgagttgagacggaacggggtggcgcaagctgtcctgcgtgcgcatagggaaggggttactgtaatgggaatttgtgggggatatcaattgatgggacttgagattcacgatccggaaggagtggagggagagatccgccaattgccgggactgggactgcttcccgtcattactacgatgcaaggggagaaggtgacacggcaggtgaattttcattttcttgagaatgcggaaacttgccaaggatatgaaatacacatgggagaaacccgcccggttccgggggtgtctgtagttcctttgaataaactggaagacggtggagaggacggttgttttgtaaaccaaaaatgtatgggaagttatattcatggaatattggataatcaggcatttatagattatttactggaaccatacgcagaaaaactggagtgtcatacggtgttggattaccggacttataaagaagaacaatatgataaattggcagagcatgtacgcagtcatctcaatctgcctttgttgtaccaaataatgagtgggaatgattgaaggacatggtgatgatgcttataagtataaagcaataaagataaatttcagttcaaacgtatataatcatgtagaccatagcggattacatcaacatttgtttcagcagatggaaagtatccgtacgtaccccgagccggaaccttattcattggaaaaggttttggcgaaacggtttcatctttcgtctgaagaggtttgtgtgaccaatggggctacggaagccatttatttaatagctcagacattcaggaatcagatttcggctatcttgatgccgactttcagcgaatatgcggatgcttgtcgtctgcatggtcataaagtggttcctatatataacttgaaccgtttgccggatagggggaggttgatatggttatgtaatcctaataatcccactggagaggtcagggagaaggaagtcttgacagcctgtataaaacaaaatccgcagcgtatttttgtcatggaccagtcgtatgaattctttacacagaaggctttgcttacagccagggaggctgcggaatttccgaatgttatcctgttgcattccatgacaaaacgttttgccgtgcccggcttgcgtttaggatatatcactgcatgtaaagaactgctacatgaaattcggacacagcggatgccttggtctgttaatcagttggctatagaggccgggcattatttattgtcttcttctcaatatgatatagatatctctttgttgttgaaggaaaaagagagattagctcaatctttactttcaataggaggaatggagatctggccatcggatactcactatatgttagttcaattgcgtatgggaaaggcagcggctttgaaagaatatctggcaacagagcagggtatccttattcgtgacgcatccaattttgaagggctgaatgaacacttcttccgtattgctacacaaactccggaagaaaatgacaaactggtagaaagtataaagaaatggacatatatgtattaattcttccgttgttgataggatggatattagataaattgcttggggatccggtaggattgccgcatccggtggtaggattcgggaagctgatctctttttgtgaggaacgatggaactgtggggcacatcggatgttgaaaggagggggggcggctattatgcttattttgctagtatatgtaggatctgctttggcattgcattatctgtttttgttgaatcgctggttggggatcgccctctccgctgtgcttgttttctattgtttagcagggactacacttattagagaagtaaaacaggtttttctagctgcggaccgttctttagaggaggggagaaagcaggtttcccgtattgtagggcgtgatacctcagaactgaccgatcaggaagtgcgtatagctgctttggaaacgttggccgaaaatttgagtgacggagttattgctccgctgttttggtatttgcttttgggagttcccggtatgcttgcctataaaatggttaatacgcttgattctatggtaggctataagaacgaacgttatttgcaatttggttgtgccgctgcacatattgatgatatggcgaactatattccggctcgtttaaccgcacttttaatggttttgtctgtggggcgtcccggtttgctgagatttgtaggtaaatatggtaaccggcatgcaagtcctaattcaggttatccggagtctgctttagcaggtatcttgaattgccgttttggaggtcctcatgtttattttggagagatagtctataaaccttttattggagataaggatcggcttatccatacacaggatatgcataaagctgtcgatataaacagaagagcagaaattttgatgattatagtaaatattgtttgcttatatttggtcagctgaaaaatatatattacttttgttcctgttttagagatgcggcagtagctcagttggtagagcatcagcttcccaagctgagggtcgcgggttcgagtcccgtttgccgctcttttttatttttcttcactttccaattcttttatctctttattgaggaacacggacaggatggttcttaaaacaacaatacctcccaatagggctaattcattcaaggttggttccaatactgttttcaaaatatccgaagctattaggaattctaagccaagaagcagataagttccgaatgtggctcttagttttcgtatattggtaatggaataccctccggtaaagcgtcgtatttcattcttcaaaaaagaaataatacctatcaacgctccgtatgtgacaatcaaaaggcttgtcacacttataacaacagctaataaatctaggaaatgagtaagcatatttatttgtctttataaatagaacaaataaataagcgatatgttcttgcatcacgataattttatcttgacaattcctccataaggagtgagtgcgctaaatgcctcttcgggtttaatgatacctgcataaatttgtgcgttcagtaaaatgccgccatgagcaaagatcgcgacttgttcatacggtttttggcgaagctcgtctagaaaaccggcaacacgccggtattgatcttcaaaagattctccattggtcgcttttacatgcagataatctgcataccatctttccaagttagcgtcggcaatttcatcgaaccgatgcatttcccaatctccgaagtttagttctttcaagcggtcgtcccgttctgcatccgggtagccgcaaaaggtagccaggcgtacacaacgggttaacggactggtataaactttatcaaaagataaaccttgtaaattggctgccgtttgagttgcctccgtttcaaaagtcggctttaagggtacatccgtctgtccgtaacaaacaccttgcggaacatcaacagcagtatgacgcattaagtatattaccataggtttgtatagattaagtttatagttagataaaaagaaaactcacataataggaaagtcgctccgcaacaatcaccggtatatccttgcaggcgtctgcgcatgagtgacattaaaaggatgaacatcatagcaggagcgatggctgcccaccagtatcctttatccagtaataaaagcataggcagggttccggccataaaagcggataataaaatacctggactcatacggtcatatatgaccttcgctttcgattcttcttctttacgggcgtatggaagcgtgttgatgatttgtgcggcacaaaacttgctccaggcatctccgcttagtatggccgcacatgccaagggtacagaaagtgtggtgagtatattccacatcaatccataatagaataataatccgagcactccgtatgtgccgatatgtgaatccttcatgatagacagaatcttgtcacgtgatgtaccgcccccgaagccgtcgcagaagtctgccaatccatcttcgtgtaaagcacccgttgctagtaaccgggcggccagcgccatgagcacagctatctgtacaggtagaaattctgcagtgatccatagagtgcctgccatgatacctcctgtcagccatcctacaaagggccagtaatccactactcgtttaaagtaaacaggtggtacattagctattttccaaaacggaaggcgtgtgaaaaaaatgagggaggcaagcagtttcatggttaaaaatatttagtgatggcggcatgggcgaaattgtccatctcattcatcatgtttacagaggaaacgacgataggataagcgcatatcgctcctgttccttctcccaagcggagacctaaatttaataaagggcgcactttcatggcatccaatactagtttatgaccgatttcatctccctgatgtccgaatatggcatacgagagaacttccggatgaagttttgaggcggctagaatgcaattggtcatgatgaagccgtccactagaataatcattcttaattctgctgcccggagcatgccgcctattgccataaccatttcatatcctccgaaccaagcgatgatatcttttacggaaccgttaccggtataatggttaaccgattgtttcaatacattatatttatgacggatgccttctgaatccagtccgcttcctgcacccacacattgctctaatgagattcctgtcagcaaatgcatccagatagaagaaggggaggtattaccaatacccatttcgccaaagctgaccacattgcaaccgtctgcatgaatcatatccgttatctttgctccacgttccaggcataattccatttcttccatactcatagcggggccttttagaaaactgtgcgtgccacgtcctacgctacagttgataatgcctttctcgtaaggaagatcgtaatcgacccctgagtctactaatacaagcttaaaaccatgttggcggcataaaaaattaactccggcacctccatgcaaaaaattacttagttgttgccaagtgatttctttgggagacttgcttaccccttcttctactataccatgatcggctgcaaaaagtacgttgtgcggatggcttaatgtaggggagagggtttgttggattaatccgatttgcaatgcaagatcttccagaacacccaatgaacctttgggctttgtcaaattgttgattttgtctatcaatgcctcccgaaagctttcatcgggatactcaatatgaaagtttttcattgtatttattattttataggaacaggaattcccgataccatcaaatatacttggtctgcttttgaagctatatattgattcatccagccctgtaaatctgtaaagcggcgttgaatggcgttttcggatactgctccggaacctatttcattggttacgaaaataaaagtggcattttgctggataaaattatcaaactcctgtttgactgcctgtaatgcagcctctacatccgcatccaaatcaaagaaaaagttggtacaccataaggtgacacaatcaatcaatactacattatcctttacttgatgacggcttagttctttttcttcttctatattcgtccattccgatccgcgtctttcttgatgtttgataacgcgttggcggaattcttcatcccaaatacgggaagtagctatataaacgggagtgggtgataagcttaatgccaatttctccgcgtatgaactttttcccgaacgttggcctcctgtgattaagataatacgtttcattgttctacttctcggtggcacgcagaatcagcgtagtcgcacctaatgtgatgatagcgccttcctcgattcgtatccggtccttgttccccaagatctcgttcatcagaaatgttcctgtaatgctgtcattatcacgcagggtataaatgatttccccttgtttgttgcgtttcacattaatgatacaatgccgtctgtccatgctcggatctgatgtttcgatgggaatatccacttcagtgcctttgcttctgcgtcctatcaggttgtcaccttccatcaggggtaatacttgtttgtatccgaatacattttctactaccacgatacttccaaaatcctctttattggcttgttcgtccaatatttcttctttacgggttgctttcagtttggactttccgatacggatgctgaattgttttttacaatggtcacatacaaagaccaacgactggccttctgtatatttggtttcatcaaaagttatatagttgtcacatttgggacacaaaactcttttcataaaaaataatcttgtttatttagaactcaatatccatgcattcttgaatgcatcattttgtttcagttcatttaatttcttataagcagcggctttatctgcaaagttgcacaaagacaggcgataacgtccgttaccttctatgattgttacatccttatatcctttttgcttgtactcattaagtacttgctgcgcgtcattggctgtcggtaaactggatacgatgatataataattattttttttactgctcgaaggtgttgctgtttctttcttctcaagggcaggtttacttacagcgacaggcttggcaactggctgttctgtactgttcaaatttgctgcaacagcattcttgggtactgcttcttgtgcttttcctaccttttctacttttacagttacaggtttcaacgtgttttgattatttttgatattcgtcttcttgggttgctgcggtctggaaggaacggttatcaaggtcgttgccaaagattgggaacgaatggcgtcaaacagaccatccgtacctaaagaagcataattacctttgtccacatatgtgttctctaccggaacagacaagaagaaaaataagactacagctattgccacagctactgcatttcctatccactgacgtttgaaacgtactgttctctttcttttttcttgttggggaagtaattctctggttgttgcagacgttgttgaagtaagatattctaatctggtgatagaaaacgaactaagtccgtataaggtaggtgataatgcaccgtcctcattgggatgaaactcgtatgtgctatgaatattataatgtaagacccctataccatgcatttctgcacatccgttttggtatagttgttctttcaatccggctacttcttcttctatcatgcgtgtggcatcaggaaaatcggtgtgatgagcttgcatatacgattgagctaataaaccatcgtttatagtcaattggggattgaaaccaatagtacgtacagggggaagataaagattttcctccttgatataccgtgccggttgatagtgcgctataaaaccgccaaagtctggaataatcacacagtcattttccagtaacagaatttctatatgtcttgccaattcaatcatatcgcaaaattagcatttttattccgtttcagcgcaacttttatggaagaaaataacaactcactcataatttattgtaattttgcagcgaaaaagttagactaacgaattaaataaaatgaatatagcgattgtagggaccgggtatgtaggacttgttaccggaacatgttttgccgaaactggcgtagacgtaacttgtgtagatgtaaatgcggataagattgctaatctgcaacagggtattattcctatttatgaaccgggattggaagatatggtcttgcgtaatgtaaaggctggacgtcttcatttcaccacttctttagagagttgtctggacaatgtggatattgtgttcagtgcagtgggcactcctcctgatgaagacggaagtgccgatttgcgttatgtgcttgaagttgccaagacgattggtgctaatatgaagaaatataccttggtcgtgaccaagagtacggtgcctgtgggtacggcacgaaaagtaaaagcggtcatccgagaggaattggagaaaagaggggagtcgatagatttcgatgtggcttctaatccggaatttttgaaagaaggtaatgctatcgacgactttatgagtccggaccgtgtagtagtgggcgtagagtcggaaagggctaaaaaactgatgaccaagctctataaacctttcatgctggttaacttccgcgttattttcatggatattccttctgccgagatgactaaatatgcggcaaactccatgttggccacccgtatcagctttatgaacgatattgccaacttgtgcgaactggtgggagctgatgtaaatatggtacgtgacggaataggttccgacagtcgtatcgggcgtaagttcttgtatccgggatgcggttatggtggctcttgtttcccgaaagatgtgaaggcgttgattaagactgccgagcagaatggttattccatgcaggtgttgaaagcggtggaagatgtgaacgagaatcagaaaggcattttgttcgagaaactggtaaaggtattcaatggagatttgaaaggcaaaacagtggctttgtggggacttgcattcaagcccggtacggacgatatgcgtgaggctccggctttggtacttattgagaaattgaaacagtcgggttgcaatgtccgcgcatacgatcctgctgctatggatgagtcccgccgccggataggagagtcggtttattatgcgcacgatatgtatgatgcggctcttgatgcggatgcgttgattctggtaaccgagtggaaagagttccgtcttcctacctggggagtaatcaagaaggcgatgaaacagcctgtagtgcttgacggacgaaatatttatgatggtgacgaactacaggaaatggggtttgtttatcattgcatcggtcgataaataaaatagagagaataaccatgtacaaacgtttttcgataataatgttggctgttgcgctgtcttcttgtggaactccgcaacaaaaagcatccgccctggaagagaacaaggaggcaaaatctttgttggaaggtatatggttggacgataatacggaaacggcattactgagggtgaaaggcgacaccctgttttatgcagatgccgctacagctcccgttgcttttaaaattataggcgattcgttgattacgtatggtgcacggactaatggttataagattgagaagcagggggagcatattttttggtttcattcggctgtgggagatgtgatacgtctgcataagtctgatacagagaatgattctctggcatttatccacactcgggaaatccctgtttataacgaagttattaagaaagattcggtggtgacatacgataatgtccgttatcgcggatatgtgtacattaacccgtcaaagattaaagtaatgcgtccgggagtttcggaggaaggacttggggtggataatgtatattatgacaatatcatacacatttgcgtgtatgaaggcaggaagagtctttatgccaaagatatcaccaagcagatgttcaagggggtggttccggatgatttcttgcaatgggctatattgtcggatatggattttatgggcgtcgattctaaagggtatcattatcaggccacggtatgcgtacctgacggcgcatcttgttatatggtcaatatcactgctggcaaggatggaggacttgcattcgagttggtaaggtagtcgtggctatgtcattttttcgtttagcgattactatttggtcgctatcatgctctatagagaataccccgaaaaatccttcaaaagcttcagtctgctcgcaaatgccctgcctgtcggtattccggctgaaggattgggctcgggaattcttcagctggagattggaatccttcaggcggattggtggttcttccgattcttggggaatcggttttcctgaaggatatttttcggctgaaacatttcacaatgcatatccttcagtcggaatgccgatgggcagggcgtttgcggaatagctgaaagatctgaaggaaaaataaggtgtttcggcatgtagatgccgttatggaaaaaacaacaggtcaaattttaaaaagctcttgttctttcaatgaaaacgtcttgttcttttttttaaagaccttgttcttttctgaaaggaacaagacgtttgaaaggttagtaacgtgcataccggaaggttagtaacgtgtcacctcatacgttactaatgtgtgggttgtaaggttagtaatgttacaggtgaaagattatatatcctacaagcaatacatataatggatgtttgtgattgccccgcatctattttgcagagagccatgaagtgactttcttcataaaataaaattggaggaaaacaagtccgtcttcctccaatgatttttagatatcatctcttccgtttattcttttggggtgtttcttctattattggcactgggcgtaccgttctttttccccttataattgccttgttttctggaactgccacctttgtgattgctacgaccggcgccacttcgcgggttgtattcgggcgcttctcccaattcctcgggaaccgggattttatagatattcctacccaagaaattttcaatagctttgaattgggtctgctctttctcactgacaaaagtaatggcgcaaccatcatggttggcacgagctgtacggccgatgcggtgtacataatcctcgctgtcatgtggtacatcgtagttgattaccaaacgaatatcgtcaatgtctattcctcgcgaaacaatatcggtagcaatcaggatattgattctgccacttttgaattcacgcataatctgttcccgctgggactgctccaagtctgaatgcatttcacctacgttcagtttcatccgcttgaatgcttgtgtcacctcctttactttcaatttggaagaggcaaagataatgacccgttcaggtgtttgatcctggaacagggattgaataattcccaatttctggcgttcataacagatataagccgtttggataatcttttccgcaggttttgagaccgctaattttatttctaccggattgtttaagatcgtttttgccaattgttgtattttagccggcatagtggccgagaacatgatggtctgacgttctttcggcagatatttcactatttgcataatgtcatccgagaatcccatatccagcatacggtccgcttcatcaagaataaagaaagaaactttagacaagtctacgtaacctaggctgagatgacttatcagacgtcccggagtagcaatgactacatcggcccccaaagttaaacctttcttttcttgctcgaagcgcacaccatcgtttcctccgtaaacagctacgctggatgccggtagaaaataagagaaaccttccatttgctggtctatctgttgcgctaattcgcgtgtgggtgacatgatcacacaattgatggcatcttccggatatccgcctttgcttaattgattaagaacgggcaaaaggtatgcggcagtcttgccggttccggtctgtgccactccgatcaaatcttttccttcaagaatgaccggtatggtatgttcttgtacaggagtgcattcttcaaatctcatggcatctaatgcctgaagcaccccttcttctaaatttagttctgaaaatttcatatatatagttacttctttctttagagtttgccgcgttcttccaggtaagagtccttgaaacctaggaaatagaggacgccgtccaatccgatcgtattaatggactgttgtgcgttagccactactttgggttttgcatggaatgctatacccaggccggcttcggacaacatgggtaagtcattcgctccatctcctacagcaatagtttgtgctatgtccacacgttctacttgagcgatcagtttcagcagttcggctttacgttttccgtcaactacatctcccagatatcttccggttaatttgccatttactatttccagttcattggcatatacgtaatctatgccgaatttatctttcagataattaccaaaataggtgaatccaccggataggatggctattttgtaaccatatcttttcaacacgaacatcagacgttccacaccttcggtgatgggaaggttttctgcgatttctttcattacgctttcatccagtcctttcagcaaagccacccgttctgtgaagctttctatgaaatcaatttctccacgcatagcgcgttctgtgatttctcgtacttggtcacccacaccggcgcgttcggctaattcatctatacactctgtctgtatcaatgtggaatccatatcgaaacaaatcaagcgtcgcatacgtcggtacatattgtccagttggaaagaaaagtccatttccaggtcactgctcagtttcattaacgcctgttgcatttcttcccgttggtggggggtgccacggacggagaattcgatacaagcccgtacattcgctttccgctcatccaatggaatacgccctgtaagacgtttgatagcatcaatatttaaaccttgttccgctaatattcctgtgactgctgcgatttgtttggctgtcagcttgcgtcccagtaaagtcaggatgtaccggttcttgccttgcatatttacccattcctcatattcttccacagtaacgggatagaaacggatattgatgcctaatgcggaagctttaaatagcaactctttcatgatattacctgaatctttttcctggcttttgaataaaatgcctaatgacagggtgctatgaatatcggcctggccaatatccaaaatggtaacatcatactttgacaaaatctccgtaatggaagcggttaatcccggccgatcaagaccggtaattctgattaaaataagttcagtattattattcatactttgtagttgctatttacatattgcaaaagtacgtaaataaatccttatcagctatattttctgcattcttttttctcgatgaaaaggatgattttatgctatataacatattttttgagaaaaaatcttggagttgatttcaaaactccttacctttgtcgcagatttctaatttaaatggtattgattatcagtactaaagataatgttccgggtggaaatcactgtttaagggcagtctcggatagtattaactaagatcgaattacatgattaaaaatgtaaagtggatttttgttgtattaattattagttccttgatttcattctcttttgtagggaaaaacacgccgacagaaggcttgaccataggagacaaggctcctacatttactatctgtggcgaaaagcagttgattgacttgaaggatttaagaggtaaatatgtactgctaagtttttgggccagctatgatgctctgtcaaggatgcagaatgctactttgaatcatgccatcgcgcaggccgacaatgtagaaatggtttccgtttcatttgatgaatacaagtcgatatttaacgaaaccattaaaaaagaccagatatcaacttctaattgttttgtggaattggctggtgtttcatcggatctatatcagacttatcgcttgaaaagaggctttaagaactttttgttagatgaaaatggcgttattgttgccaaggatatcaccgtatccgaactctcttcttatttgaattgagagaacatttccgaaaggaagaaaaatacaacaaaaataattaccgtggattctcaatggaatctgcggttttttttgctatatggtattttattgacttacatcatttatcattcacaatcaaatgcttacctttacggcggataaataaaaaggttatgaaacagattaagaatattgtgtttgatttcggcggggttatcattagctttgaccgtgaacaggctgtaaaggcgtttgagcggataggagtgagggaagcggacagtttattagggaaataccatcagcaggggatttttcaggaagtagaaaatgggaacatggacgctgaaactttccgctgtgaattgagtaaaatttgtgggaaagaattgacttatcaagatgtggaaaatgggtggaaaggatttgttacggacgtgccgcaatataaattggattacttgaatgagcttcgtaagaagtacaaggtatatatattgagcaacaccaatccttatgtgatgggatgggcgaggagtaatgcatttacttctgcgggaaagccattggacgcttatgttgataagatttacacttcctacgaagccggttccaccaagccggatcctggcatctttaactatatgataaaagatagtaaactgaatccggctgaaacaatatttgtagatgacggtgcggccaatattgttattggtaaagaactgggctttattacgatgcaaccggagaacggcgaggattggcgtcaaaaactagaaaagctcctataattatttaggagcttttctgtataaatagatagcaataaatgtgtaaagtatattaggaatccataccgctataataggaggggtgtttccgttgacagcaaaggttgctgacactgtttggaacaaaatgtatgaaaaactaagtgctaaccctactcctaaatgcagtcccattcctcctttcatttttctggatgataaggaaacaccaatggttgtcaagataaaagcggcaaaggacatggctatacgttggtaatattcaatttcaaattcctttatgttggcgaacccgcgtcttttctgcttgtctatatattctttcagttcagggcttgtcatggtttgttgctgccctttcataatcaggaaatcttgaggctccattttaatgatcgtatccaaacggtcaccacgagtgattttttcacgcataccttccatctcacgtatcatatagttcttgattgtccatttgtgtacagatgctgtatcataagtgacacttcgggcagtaaggtgggcaactagtttcttgtcatcaaacttgtctaaggagaagcggtatcccgttttattataattttcataacgttctatgtaggcaatgaccccgctgtctacttccagttgcacattccgcacatattcctgtttcttttttttcttataacggtcctcaaaatccaaacgggttacatttcccttaggtatgacgtatgctcccagtccgaaagtaacaacggaaatgattgcagccgaaatcatatagggccgcatcattcgtttaaaactcattccggtggagaacatggcaatgatttccgagttttctgccagcttggaagtaaagaagataacagcgataaagacaaacaaggggctgaacagattggagaaataagggatgaagttcatgtaataatcaaatacaatcgctttcagcggagctttattattgatgaacctgtctatattttcgttcacgtcaaacactactgcaatggagataatcaatgcaatagcgaaaaagtaggttcccagaaacttcttaatgatatatatgtccagtcttttcacccatttatccagtttcagccaactgatattcggcttccaccattttttatcctttggagatgaatctgtgtttgtcttgaaccaattcttcatttctagtaatttatgcgaatcagtagttgatttctgattcttgttttaaaaaattagataaatgaatgcgatggcaatttttcccatcgtatgtactaaaagtccagatgttgatctgactttcatcgctctttgaatatttgttttctcattcagccagttgaaaaacgcttctataggctgtctgacctttgaaacagcagtagagaacagttctcttccagctttctctctttgagtaataactggttcctctccttttattgctttcacgggagttagcatagtagttccttgttcttgttgcttattgccccagtaagaaaaatccgagtatatcttatcggcaaagatgtttctgtttataaggctatcagcggcttctcttttaagaactgtcaggtcattctcttctgccgatgataagagaatcatttccgggaatggaatagttccttccctgcggaaggctaaagcatggagtttgagaccgaagtaatacatgttctttgtagaacagtatcctttggttgcaatttcagtagctacctttcctgttttattctttcctgcacaggtaataataggcatagagtcaataagtgatgtcatagaatcgcaatcctctggtttaaagaatgtaatgagatgctttacaagttcactaatggcctcactcatcaggtttaaccgatagttgaatgtctgataagaaggtaggttggggaaccatgagagcaaatattcttcagtgaatgtatgtatctctttgatttggaagtatcgctgataggctccgcaaaacagatatacggtaagcagttcctggtctgtaaagataggagttgcattattactgaatctctggcagtaaaacttcagtgaagactggtaaatatcgcagatgtacatatatatttttataagttttagctctttctccttgggaatcataattagaataatgagtggttttattcttctaatatactgattttcaaggagattgagaaataaataaacgagataattaattgaataataacattttaactaactgaatcaagtaggtatttcaactactgattcgcataatttataatcttgtagataagcgttttaccatcattggtttccacgtagagaaatctcctgcaatgatgtgtttacgggcctcgcctgctagccacaggtagaatgccaagttgtggatagaagcgatttgcatggccagcagttcttgtgcgtggaacagatggcgcaagtaagcacggctgtacatggtatctacatacgatgccccttcggcctcgataggagaataatcatcctcccatttcttgttgcgcatgttcattatgccgtttttagtgaacaacattccattgcgtccgttccgggtcggcattacacaatcaaacatatctacaccgcgttctataccctccagtatatttaccggtgtaccgactcccatcagatagcggggcttgtctttgggtaagatttcattgacaacctctatcatttcgtacattttctcggttggctcacctacggctaggccaccgatggcgtttccgtcagctcccttggaggcaatatattccgctgattgtttgcgtaagtcgggataaacacagccttgcactatgggaaataatgactgttgataaccatatttgggatcggtttcgttgaaatgttttatgcaacggtccagccaacgatgggtaagctgcattgatttttttgcgtattcataatctgcggttcccggagtacattcgtcaaaagccatcatgatatctgcaccgatagtccgttcaatgtccatcacccgttcaggagtgaacaagtgcttcgaaccgtctatatgtgagcgaaattccacaccttcttctctcattttgcggatacctgataaagagaatacctgaaaaccaccactatcagtcagcataggacggtcaaaaccattgaatttatgcagacctccggcacgttctattatatccagtcccggtcgcaaatacaggtggtaagtgtttcctaggattatctgcgctttaatgtcctctttcaactcatgcaaatgcacgcccttcaccgttcccaatgtgcctacaggcataaagatgggggtttctatttgcccgtggtcagtcgttatcaatccggcacgggcattcgatttagggtctgtatattgtaagtcaaaagtcatatttatttcttttcttctgttttttgattggtaatattaaaatcaatggcaccgtttactttttcattggtgagagctaaagccaatacttccttaatatccgtgacataatggaatgtcagtccttctagatacatcggctgaatttcttcaatgttcttgcggttttcctcacataaaatgatgtctttgattccggcacgtttggcggctagaatcttttccttgataccgcctacgggcaggacttttccacgtaatgtgatctcgcctgtcattgccaggtttgcttttactttacgctgggtgagggcggatgccaatgacgtcaccatggtgataccggctgacggaccatctttggggatagctccttcaggtacatggatgtggatattccaattgtcaaagatatcctcctgtaaattcagcagtttggtatgtgccttaagatattccaaagccagcatagccgattctttcattacatcacccaagttcccggtcaacgtcagtttaccgccttttcctttgctcaaactggtttctacaaacaagatctcacctccgacagctgtccacgccagccctgtgacaacaccggcgtattcatttccttgatatttgtcacggctatattctggcgtgcctaggtatttgcgtacatcggcaggttttatttcatgcatcacttcatagccgtcacgtgcaaattccaacgctattttacgcattaccttgtttatcttcttctcaagttcgcgtaccccactttcacgagtataattttctacaatacattccaaggcagctttagagaacttcacatattcttttttaatgccgttggcttccagttctttggggacaagatgccggcgagctatttctactttttcttctgtgatatatccgctgacctctatcaactccatacggtccagcagagcaggagggatggtgctcaaattgtttgccgtagcgatgaacattactttagacaagtcgtaatctacatccaaatagttatcgtggaaagtgttgttctgttcggggtcaagcacttccagcatagcggaactgggatctccgcggtggtcactgcccagtttgtctatttcgtccaaaatgataaccggattagaggactcggcttttatcaaacttttgatgatacggcccggcatggcaccgatataagttttacgatggccacggatctcggcttcgtcatgcacaccacccaatgacatacgtacatatttacgtttcaatgatgccgctatggaacgccctaaagaagttttaccgactcccggaggaccataaaggcagatgatgggtgatttcatatcaccttttagtttcagcactgctaaatgttcaaggatacgctcctttactttctctagtccgtagtggtctttgttcaatgtcttttcggcattacttatattcaggttgtcagtggtaaagacattccaaggtaatcctaacagggtttgcaaataggtaagttgcacattgaaatctggtgattgggaatttgtcctttccaatttggaaacttctttttcaaaaagttctgccatttccgaactccattttttggttcttcctttttggcggagttcatctatctcatcttcctgtccggcacccagttcatcctgtatgtttttaatttgttgctgcaagaaatattcgcgttgctgacggtcaatatcttcgcgtgtacgcatttgaatgctttgtttgatatcagccaattgtacttcacgatttaagatcttgaccagcatatacaggcggctttgcaaatcgccagcttttagcaattttatcttttcttctaccggaatagggaagtttgcacaaataaagtttaccaaaatttccggattgtccaagttcttgattgcaaaaacagtatccgggctcatcttctcggaagcctctatgaacttgctcgtcaaatccttgcaggtgtcaatcaatgctttgaattcgtccgtttccagttggtcatttgcctctggaataggagtcactattcctttcaaatatggagatgtttttgtgatactgtccaaatgtactttgggcccgtttgactgcataattactgtggtatttccacctggcatttcgaatacacggagaatcttcccaataactcctacatggtacacatcattaaaaccaggatcatccatgtctccctgtatctgacaaactaccgctatgggaagttttttcttgtatgcagcatttaccaatttcaatgtgctggggcgtccaatggttacaggcattactacagatggaaacattaccatgttgcgtaaaggcataacaggtatttctttattaaattccatagcagttacttcatccggatccgtttggatttcagctaacatagagatgtcatcgttatcagtattcaacaaaatatcctctttcttattcctcttcataatttattcctcttgtgttaaattgagcccaatgcccaaaacggggacaaagttaatcattccttgtcgaataaggaaaattcatgggaactaattgagttttaaaaatcaaatatttcctaataattggagtaattaaatggatttttctatttttgacagctaatttaataaatatagtatgccaaatccttatttttcttttaagcaatttactgtttatcatgatagatgtgccatgaaggttggtacggacggagttttattgggagcttgggttgatgtggtttctgcccgtaatattttagatgttggtactgggaccggattgatttctttgatgatggcacagcggtgcaatgcccagataagagcagttgatatagatgcggatgctgtggaacaagctcgtggaaatgtggcggcatctccgtggcaggataggatagaagtggagttgcaggatatttgtcattttacatcggaaacactctttgatgttattgtttccaatcctccttattttaccgattcattgaaatgccctgaaaggcagcgtaatatcgctcggcatacagatcttcttgattttgataaattagcagaatctgccgcccgtttgcttcattccgaaggtgttttttctgtgattattcctgctgatggtaaagaatcttttttgatggctgccactcgttacggattacatctctcacaccagactttaattcatacaaaacctggaactgaacccagacgggtattgcttgctttcaaattctctgtggataaatgtgttacagacgatttgaccatcgaattatcacgtcatgtgtatagtgaagaatatatagccttgactaaagaattttatttgaaaatgtagagggtggattattctgaacatcatcaaagaaactgtttttatttggcagagtctttactgatgttcagaaaaaagatattttttattgttttttggatagacgacgcaataaacttttgttaagctcaaataaatggctgtgccggaaagcaaaagtttcagctttaggcttcataccactgaatatttcggatatttgttgtaagagactaaaaggttcgttctctttttttttatcagaaacaatgatgttgagtccgtgtggaatcaattctacctcaatatcctttcctcccatgatcggatctccgtcataatgcattactccgggttttgaacgatgtatcttaatctttttagtacggaatgtcttgatccggctgttttggtctatggttttgttgaaaagttgaaaagataaagaaggaacatccaacactgtgaatggctctaatattgtgacatccatcaaaccatcggttaacgaggcttgtggagcaatatatgcgttattcccatattgggaggcattgccgcaggctatcaggaaagctttgtattttaccgttccttcttcattttctatttcataagtttcaggtttgtaactcagactctcatgcaaggtattttccagataggttagtagtccgcgtttgcctgaatcagcaaactttaagctgacaaatgcgtcaaaacctactccgcatgtgcagaaaaaaggtatgttgtttatttttccgtaatcaatacaggcaacagaactttcatttataatgtcaatagcagccttgggctccaaaggaatttgtaaatgtcgcgctagtccgtttcccgacccgcaaggtataatacctaatgctgtatccgtatgtatcagtgcacgtcctatttcgtttatagttccatctcctccaatagctactactatatctactttctctttggcagctgcagccgcaattttttcagcatggccggcatattgtgttttgacaatcgtataatcataaagtgtacggtttatacgttcgtcaatccattttaatatggctcttttcccctgtgtccccgagataggattaacgacaaatacaattttcttttttgtggtcatacttttactttggtagtttagctctttattaaacgcaaaagtaatacattttgtttataactaccctaaatcctaaaagttttgatgtccctaaatatttttttgaaaaaaagtacaatcggttgtagaatttactatctttgcagcctgttttgacgggaacaccttgaaaacagaatgtattagtgagtttatatacattattttaaagtaggccgacgaggcttacatatacaataggatatgggattattacaagacaagttaagtaaattcagattgcctcaactatacatggaaagaggcgtttacccttattttcgtgagatagacagccatcaggatacagaggttatcatggatggtaaaaaggtgctgatgtttggctccaactcatatatggggttaacctacgatgaacggattatcgaagcagctattgctgcaacccgtaaatatggtacaggttgtgcaggttcacgcttcttgaatggtacgcttgatctgcacgttcagttagaaaaggaattggcggaattcgtagggaaagatgatgcattggtttattctaccggttttactgtaaatgaaggtgtggtatcttgcctgacagaccgcaatgactacattatctgcgatgaccgtgatcatgcttccatcgtagacggacgtcgtctttctttctccacccagttgaaatacaagcacaatgatatggaagcccttgagaaagaacttcagaagtgtaaaccggaatctgtgaaactgattgtggtggatggggttttctctatggaaggtgatttggctaacttgcctgagattgttcgtttgaaagacaaatacaatgcaagtatcatggtggatgaagcacatggcttgggtgtgttcggtcgtgacgggcgaggagtctgcgatcacttcggactgacagatcaggtagatgttattatgggtacattctcaaagtcactggcttctatcggtggttttgttgctgcggataaagatacaatcaactggttgcgtcacaactcacgctcatatatattctctgcaagtaatactcctgctgcaacagctgctgcacgtgctgcacttcatatccttaagagtgagcccgaacgtcgtgagaatttgtggaagattacaaattatgctttggattgtttccgtcaggccggttttgaaatcggtgatactgaaagtccgatcattccactttatgttcgtgatacggacaagacattcgaagtgactaagctggcatttgacgagggtatatttattaatcctgttattccaccagcttgtgcaccacaagatactttggtgcgtgttgctttgatggctactcatacaaaggaacaagttgactatgctgtggataaactgaccaagtgctttaagaagttggaaatcataaaataagatatcacaggttgcctttgtaaaggcaacctgttttttattatgtattattgtctatctttgtatccgttttacttgaaaaggacatgaatcggataaaaggtattctatatgcagcagtgtcttctgcgactttcggattggcaccgtttttttccataagcttgttggctattggatattcttcttttgaagtgctgacttatcgttggggagttgctacagttgtcttgcttgtttttgcttttcttaccaaatgtgattttcatatagggtataaaaattttaaaacaattttcggactgagcttgctgcgtgcgcttacttcgttcagtcttgtcatagcttatcagaatattgcaagtggtgttgcttctatcatccattttatgtatccgctggctgttgcagtaacaatggccgttttctttagagaaaagaagtctattgtgactttcgctgctatcgttttatcattagtaggagcatctttattatcttccggaaatatagaatataatggtggaaatagaatggtgggattgatagcggcctgcatatcggttttctcttatgccggttatataataggtataagaaaaactagagcagtggaagttaattctacggtattaacttgttatgtgatggggttgggagccttgctctttttgctgggaggacttttctatgataagggggtccgttgggaaaccaatgtaatcacttggctctatattgggggactggcacttcctgcaactgcgatctctaatatcacgttggtgaaggctgtaaaattggcaggaccgacgttgacttctttattgggtgcattggaacctcttacggcagtcctggtaggggtatttgtattcaatgaactctttactacatacagtgctttgggcataatccttgttgtgatttctgtaagtttggtgctttttcagcaaaaaagaacatatacatagacgtttgctattcagttttcaggctgtttaccggattagtgcgtgcactaagataactatgtattgttatcgtaatggttgtaattaccaatacaataagaataggagtcaggaaattccattgtgtggctgaaattcgataagcaaattgctccagccaatgttgcattaataaccacgttatcggaatagcgatgatgtatgctactagtatttgccatagaaaagaacggtttagtaaccatactatttcccaattggaagcaccatgcactttacggattgcaatttcacgggtacgatgacgtacagcgtaccatgaaataccgaacaggccaaaacaggtcagggccaatgcaataaatgagtagctgataaggattcgggagagtataattactttgttattacgcaacataaattctttatgcatatctacatatttgaaacctctgtcaccattcatttccttccataatttttcaatagataccaatgtttctttataatattcaggaatgagtttcatttgtatgaatgttcctttctgaattaaatcctgttctgttccaatagatatttgttgaccaccgatttcttcttccagggagttaaatgggaaattcttgaaaatacctgcaataatacttaatgaatccgagaatccatcaaattcatttagtttatggcctatgtgggaaacatctatgttcagcagacgcgcaaggttttcattgataaaagccggatgagtatattcccgacaggcttgggagggagatactccggcaatttgtcggatatgcatggtttggaagaaagctgtgtcagtagggatgtgtgctataaaattatgttggatactaccgtctgtttgtcggataggaagctcacgaagccaacagtaaagtacagaactcatggaaagacttatagactctatcccatccatttgtttcagttcctgatagagcggaaacagaggaagggtgccatttcctatttctattgtattttcgtaatggtatgcacgggatttgattagattcatttgtttttgtgtaagagtggttgcatacactaacccgattgaaaatataaactggatggtaacaagcaaccatataaattgttgctttttccttcctgtataagtttgccgatacttgctcaaagtctgttgagagagtttatggctgatatacagaccgggaatgacagccatgaagaaaatgaaggataaaagtaaaggtagaacttgccagctgaaaaagaaagagaagaagaggtgggtagacaacagatcattaaaccacggcagcatgtcattaataagcaataatgataacaggaatgcaaataaaacggtaagtgctgcatcaagaaataactgactgcggatttcttttgattttgctcccatcaatttctctatatgtatcattttaagttgctgcatgatacgtgagagagtcagatttgtatagttgaaacaagcgatgataagtacaagcagggctgaaatcagactgatatatagtaataatacgtcacagtgttggaagaaagccaactgttgctgcttactgtcttttccagtattaaagtatagttcttttatcggatcaatataatattgtgaatccggtactaaagttggaatcttgtcttttttaattttttcctgtaaagctaagggagatgcacctggttgtagttttaataatacgggacctccccatgatttgtcggatagtcctgtcagcaaatcaaaatgcagaaaagattgtggacgatcttctaatatagctgctactttataacttttattttgtccttcttcgttgattatttccaggatttctccaattccggaatgatttccgaaaagtcggtgagcaaatcttttgtttacagcaactttgtccggggtcgtgaggacttcttccaggctgccttctaaagttgtataagggaaaaattgatttaaagtagagtcggcactgataaaaagaaactgtttgatatctgttccattatatttgcaaagattaccagacattccgttcacatgcagaatatctgtaatttcagcatatttttcttttatctgtgtggctgcgtctgaggtagagtaggctactttaataccttcttccattggagagtcttgacgtaatagataaatgaggttacggtcggtattatatttttccacattatattcatggataaaaaaagtcataagcagattggtgcatcctaatccagctgtaagactgaatagtgaaatcagaaaaaaaagtttgttccgccaccagttgcggacaataagtttgatgtttaagaagatgttcattgttataatatccttttgttatcattgaggtggttaaaccacctcaatgataaattaatttatatttttatttcattcaccacctgtccgtcaaacaaattaatggttcttcctgcatagccggaatcgtgttgggagtgggtaaccataacaattgttgttccttctttattcagctcggtcaaaagttccattacttccttgccgttcttggaatccagattaccggtaggctcatctgctagaatcagtttcggatttgctactacagcacgggctattgcaacacgttgttgctgtccgccagatagttgttgtgggaaatgttttactcgatgagcaatagccatacggttcatggcatcttctacccgacgtttgcgttctgtcgccggaattcccatatacaataagggtaattcgatattttcgaatacatttaattcatcaatcaggttaaagctctggaacacgaatccgatgactcctttacgtaaattggtgcgttgtgcttcggtaaatttggaaacgtctgttccgttcagttcgtaagtgcctcccgtaggattgtccaaaaggccgaggatattcagcagggtggactttccacaaccggatggtcccatgatggctacaaattcgcctgctttaatttctagattgacattgttcaatgcccatgtttcgacttcttctgttttgaagattttctgcaagtttactgttttgatcataatcttatattttaaaagttattcgtttttgattacttctgcaggattctcgttggctgctttccatacccgccaactgattcctgctatgactgtcagagccagccctataagaataaggatgaatggtaatggactgatactgacctgccggacatagtttaatatccattgcttgataatgacgtatgtgattggaaaagcgaacagtgcagcaatacaaagcatgattagatattcccggaaaaacaggaatagaatgctccatactgtggctccatttactttacgtattgcaatttctttacgacgttgttcgcaagtaagtgttactaaagaataaatgccgaacatggcggtaagaatacatactaaagacgcgaaactaagcagccgggtcagcatttcttcggaacgcaggtaattattatatacttcttcttcactgttcagacgcaagatattctcaggagaacattcggtctggtaaaggtgttcaagggctttacgacattcattccacgttccttctttatatttgaataagataccggcagaacgctgcattaatcccatttgttctccaaccagaaagcctgtatggggaatgggtaaagtcggtgctccataatggcaatccttcactacgccgacaattgtataggtaatgtatgattgtataatatgtttgccgatggcttcttgtgggctccatcccattcggcgcgccagtgattcattgataatgatgtcttcataagtagataggtcatcaagccattcaccggctaataaggtgatatcgtaaaaacggaaaaaatcttctttccctaaaaataacttaaccggaactggcgtatcaataggaatatccagtccctcccaattgtcaaattgcccgatagctgtcagttgtgatactatggggtaatagtcaggttgcataacttcggttatcatgggaagttcttttatttttcttattaaaggagtataatccatgtctcccataacagagaagctgccccgattcttaattttcaatcctaaatcgcggtgacgcaggtaatccaattgttggtttatcaacacggtacatcctataaaagacaaacagacaaacaattgaagaactatacttcctctacgtaactgtgtaccggtactccttccggtattgtaacgcaaagagaggtgtagggaacgatgatatagtatatataaaagtccgataatggcagtcaatataattagggagatcaaaccgatgaaaagaaaggcttctccgtataaagaggattttgctgtatcaattcctgtaagttctatgaaagatggaaagcatatttctatcagcagaaatccggtagtaactgcacacgccaacagaagcaaaaattccacagttaagagagaaacaagcgagcggatgttggcaccgtgtatcattcgcagtgccatttcccgttgacggactctcatgcggttaataaataaggtgagataattgattaacgcacacgttatgattaatataccggctattgaaaaatagatgatatactgaaaagttattccagcttctttatcatctcggaaatcttttgcataatgtagtttggaaagcggagtaagtataatccgttcaatgccggtttttctggtcaatgtcacttgtttcagttcggcaggcaggttggcattgatttttgattctaattcttcaatgtctgtatccggctttaccttaatcagtatgctccaagtgatataccaccaggtttttcccaattctgggttgcctataaagtcaaaaggaaaattggtatgtctgttttcagcttggacaatggcacaaatttttttggtacgtctgagcattttcacctcttttcctatcgggtcttccgttctgaaccatttttttgcagcttcttcagtgattgctatttcggcattatctttggggagcataaagttacggtttcccttaataatccggatatccatcagattcatccatgcactgtctgctgatgaaaaaacggcatcctgatatttgtcattcacgctgattcgttcagaaatgagatgaaagggggcggcaactgctatatccggaaagtgctgggccaaataagcggctaaagaatagggaactcgtgttgaaattttcccttccgtatattcgtcattagtgcgtaccatatagatacggtcggcatcctggcggaaatggtcgtatgtcatttcataatgtatccagtaaagggataatgaaaaacagacaaatcctacagccagtcctagaatactgactgccgattggactttgtactttactaagttcctgattgctattttcagacaatgttttatcatagttgaatctatttcttatcattcgttcttgattacttctgccggattaattcgtgctattctcagaatacggaataataccgtgagggccgtaataaatgttattccgatgaaaattcctgcccaatatatgataccgtcattaaagaatacaatatatgcttttttccacatttgtatgactatataaattaatggaaatgcaataactgcggaaacagtcagcagtcttatataaaggcgggcaaacaataaaataatttgtttcaatcctgctccatttaccttccggatagctacttccttttgtctgcgttccgtatccaatgtgatggtcgaataaactcccaacaaggtaatgagcaggctgacgatagaaaagaacaggataatccctttcaatttattttctgttgcttgtgcttcatatatatcctcctgcaatgtagtgacttgagggtgaatactttccggaagtgtttcttgcaatgttttttctatcattttttttatttcagccgttttccccggctcgcatttcagatagcaatgacctacataataattgaagtcgctgggtaagaatacaaatccaggactttgattatatacattggcgataaaatcgccacatataccgcaaatggtatagctttccgagtaattgtataaaatagttcctaacggatcttttttctggcgttccgcccatgttttgtctactaccaaatcctctttggcttttaatgtgtgtcccgatagtaaaggtatgttcatgaattggaagaagttagtggaaacattcatgacatttacttcaaaactgctttccgggttacctttttccatttgcatcccagtacctgatatacctttcagataactgatgtctgccaataatttgtcttgtacaccggaaaatttggatatacgttctattaaagccagtttctcttcattcttcataaacatataatctatggagaaacttagtatattggctttttctttttcagtcaatgtgttgaatagggtagattccgttttttccgcttgcatataaagagctacggtaaatgcgacgaaaatccagcatataaaaaattggatacctaacagtatatttcgcattccatgtttatgacgttttatctcactgccatgaatctctgtctggatagatgtgtaatatatgcgcaatacagttataaagcataatatcatacataaaaataagatgaatatcatatactctgtggtctgtataaacaagaggttcttttcaatgataagaacataattaaataaattgaaattcaaataggggctgattatttcaatcaagcagaacgtaaacaagaaagcgatgaatgcaatgatgacagactggacaaagagttggtaaaaaagtcgctggtttccactgcccataactttgcgtatcccgtattcacggttacgattcaagaaagttcccataagaaaatggaagaaattaagaagtccggtcagtaagatcagcaggcctactatcatggttattcctgcaaaataaggagcgatggacttatcccaaaatttctctccaaagggtgaggcggttatagctgtttcttcgtcatacatgtagtgcttcatatttatggagcgaaaacgggcttctaattttcgggctgttttacctggacgtagcagagcaaaaccaaaacctccggtcatattatcacgaccgttgaattgcaatgttccttcactgtcattcaaagttagcatatccagtttctcaagaaaactcaggctggtattcaggggaatatcttctatcacggcctgaatggtataggttatgcctccagtacgaggagtggtatccggtgctgtaaaaagacgttgtgtcaatatcatacgtttgcctatgggattttctgactcaccgaaaatcttttttgctaaagagcgggtcagtataatggcattgggggtgttggaggctacttcccatgatccctgtagtatttggggagtgaatactttcctaaaaagagagtctacttccattgtcatcaaatgatcgtatggtaattctttcccttcttttatctctacgttgtaactccgctctcggggataaacggtaaaggtaaaatcttgaacctcatcgaatctaagtttacgcaattcttcaatcgttgttgccggaataccagaatacaaatctccccgtgttgtacataaatttatgtctgctatgcgttccttattggaaaagcaagaatctacttcgctgatgaaccggctacaataaagacagatactaaaacataatatcccgacagatagccctacgatagatatcagattttgtatcttatattttaataagtggcgcattgccatttttatataatgccttaacatatttccgttgttttataaaattattctgttttcatgatttgcgtcggattaatatgtgccgccttttgtatttggtatgctaaggtgcccagtgatatgattattaccaacagcaatgatatgataaaaatgtctatactgacaggtgcccttattgcaaaatcctgagtataggtatttatcagataacaagccaaaggaatagctatgacaaatgctataattaaaacggttatatatttgcggaataacagtcggtaaaggtctttggcacttgcaccgttcactttacgaatcgctatttcccgatatcgttggcgaatgtcaaaaagagaaatccctaacaaaccaagactggaaataataatagctatacttgcaaaaatagaataaatagtggctgtttggcggtcttgtgtatacattgctttgatatcatcttccagaaaagtatattcaaagtcttcacttccatagagtttatattccaaattacgtaagaaatcaatcacttctttctttttgccgggtgtataagctatctgatagagatcaccactgaaccgtgctccgacaggatagatagtaggcttgattccagatgtcaaatgtccttcaaaataatcctctactactgcaacaataggttgaagagaagcgttagcattagcctttttttgattttcttcaatcactccaacgccattgattgaagtatagcctaatgctttcagtgcggctttgtttacaacaaaaacagtgcgccggtcttctttatttatatcgggtatctcaccttcaattacttttatatcatataatttgaaaaatgcaggagtggcgtaatgaatatttagaaacaccttttctcctttattgttcagataatttgtaccaaaggtaggagtaaggatattctcatagctaggttcgtacaattcaataaaggggcatgcattaagttcattatccaattgcatgacacgttggcggcgttgttgcatactttcataagtatagctgctaaaatctttcgattcatatactaaatttacattcattatgtttttagtacgaaagcccggctcggtacttaataacattccaagttgtcgattaaaataaagtgaaagtaccactaacaaaaaagttataatatactgtgcccctagaaagaacatacgaaaatgtttggaatgactttgggcaccgatagagcgaatggaaagaatgggggaggtgtaattgtatttaatgtatggataaatagaagttattactggtaacaataataaaatacttgccgaaagccatccgtcgaaagccgtataagaaaagtgagtgtcgaacaaatattcagtaggggcagacattatttcaataataagccaagatactaataaggcgctcagaactagtaatgtattttcaatccatatattggcaaacaatgttctgccgcatacgccaaatactttcttcaatccatattcttttccgcgacgtaataatgccaccagataaagattaataaaattcaagatgccggtgaggagcaataacaggcatacgcccgacaaaatgattaagtgagaacggtttcccgaaagaaacatagcaggttcacggtcagttaaagaaccgtcccagtaaatatccttcacagaaattaaagaaaaagtatgtgtgcgagtgtcatattcaggatcatttatataccgtggaacactacctgtcttatttatggcatttatatctgtaccgggtaggaaacgatagagctccgtattcatcctttcccaatgttgggataatttagaagagaggatgatatcaaagttaattgtagttttacactcaggttctcctacaatgccttctatggtaatgtctttgccattactataacgtagtattttacctataggattttcattaccgaaaatcttgcgggcgtatttttccgttaataatgccgactgaggtgttgtgagagatagctttccttgcactataggataatgaaataactgaaaaaagacactgtcggtaacgaggcaacgtgccggaatacggttggtaccggaaatgacatagtccttttccaatggaatataggtggtcatagcttctacgaaacgattgtcaatagaaatggtatcatagttatattgtttcagtccacttagtccccggttgccttctgtattggtacagatggcatacacatgctccctgtcgatgcaatgtgtgtccactgtcagttctctatggatatatcgcatcaagatgatgctgcatgccagactgcatgccagtcccagcaaattaatgatagtatacgatttagaacgcattaaaaagcgccaggaatatttcagtgttttcatattttatgtgtgtttattctgatcttataatttttgcgggatcaatttgagcagctttgtgtatttgccaaattactgtgcttgatgaaataaaggaaatgatagctagaactgctaaataaatccctatacctataggtgtttttagcacaaaatcctgtgtatacatatatatgaggtaatgggcaagtggaacagccaatacaaatgcacaacctattactttgatatatttgcggaataatagcaggtaaaggtctttcatccctgcaccatttactttgcggatggcaatttcacgataacgttgtcggatatcaaataaggataatccaaatagtcccaaacaggagatgatgattgctatcaaggcaaagacgaaataaatatttgctgtttgacggtcctgagcataaagtttgtgaacttcatctgtcaaccaagtataggtgaagtcttcggtattatatatttctttctctgttttcttcagatattctatgacttctttttctttatcggggttgacggcaatcaaaaaatcgctgttgccactgctgggccccacgacaaatgccatcggttttattccttcagtgagatggcttgggtaataatcgtctattacagccactacaggcataagtttggttccaccttcttccatttctcctttttcgctgacactaatccaaagtggagattcgctgcgtacaaaagcatcttctagttgcgcatagcccatggctttcattgctgctttgtttagtaccattttatagtcactccaaccttcaaatttttgggggatttctccttccagtactttcaaatcatacagttggaagaattgtggggaaggaaatagggtgagcatgggttgacgggtatcttggtcatttaacaacatgcagatagagcttccccttaatatagaataatgggaactcatccacatttcaatgtgaggacactcgtttaatagttgcttgatacggtcttggcgggcaaagcgctcattgcgcttttcttctgtttcagagcgcagataatttttgttctcgtgtaacaactcagctctaagaattctttctgtccgatatccgggagaggtattcagcaggaaatgcagttgcttgccaaagtaaaatgacaagataaggagtaatatggttataacgtattggaaaaaaaggaatgtcatacgtacagtgatagcatgacggtttgatgttattgaacgaatagatacaataggagggagataattgtatctgatgtatggataaatagaagtgactaaaggtaataatatgatgaatcccaaagacaatttccagtcgaatgccgaatagctaatttgttcattcatcaaccggctgactggtacttgggttgcttctatcaacagccaggcggttagcagtgcggcaaaggctaataactgattttccatccatatttgtaaaaacaaaggcagacgctgcaagccgaatactttttttactccatattctttagaacgtttcatcataaataccatataaatattgatgaaattcaatatacccaccaataatagcaatatggttactcctgaaagaatatacaggtgcgtacggttcccgaattgcataatggaatcgtaatcgtcatcgtgaccgatggaattttcccagtataaatctttccaagcaataaacttccaacgtattctgtttcctcttttatcttttctgtacacattgctgattttgtttattttgtctagatttactccggggagtatacgcatcagtgatatatccatacgttgccagcgttctatcaatctgtatgatactagtatatcgaactgaagtaatgatttgcagtccaattctccgatcacccccttgatagtgatatttttaccataatattccaatactttacctatcggattttctttgccaaatatattacgagcatagtgttgggtgataatggcgtcattgggagcttctaaactagcttcgccagccacaatcggatagtggaaaaagtgaaaaaaagtggaatctacagctgctatattcattgcatagttgctgttctcgtataccacattgtctcgttgctgtagcatgagacggcattgctccactatttgatggtcaaggatataaacagaatccgcttccgtccaatcttgttgcaaacttcccggatgaatgtttccttccatatcccgtaacggaatgatgatatgttccggatctacgctatgtgcatccaccgtcagttccctatggatataccgtattaggatgatgctgcatgccagactgaatgctagtcccagcaaattaatgatagtatatgatttagaacgcattaagaagcgccaggcatatttcaaagttctcattttgcatgttttattttaatattaattcttccgcgtcaccaaaggtatcatatcctgtgataactacaaattctccaggctgtaaaccttctgtgatttcatattgaagcgggttttggcgtcctatgttcaatggaacttttacagcttttgtttttgatgagtttattttgtaaatccattgtcctccagtagactggtagaagtttccacgtgggataactatagcttgttcgggttggcccaattctatttgtactcggaagctctttcctacacggacattctcgggcatttctccggtaaataccaagtccacatcaaacatgcggtcttttacctcaggaattactttagtaattttcagcgggtagcgttttccttgatagtttacggtagccggaagacctgttgtgatgcggtcaatataatattcacttaaagaagtatgaattttatattgatctagcacttttatttcagctatactttctcccgaagcaacctgttgaccgggagtaactttcacaaaacttagttggccgccaatcggagcttttactatcaagttttccaaccgttcttccgcacgtttcagttttttgctttcacgttccagatcatttctcaatagttctttgcggataagagttacggatgaatcatgtttcagactttccatttgtaatgccgtatttttcagtttatacttatattcatcttcagatacttgaagctcagccttgctcttaattcccattttgaattcctctttgtccaatccgaagcttttgcgcagtcgttccatttcatattgtgcctgtaatgtttgttgcttcagtgtcagactcttttgttccatttctatctctttctctttataagtgattcgttgtttttcccactcgtcacgttggtcttcaatggaacgaatcagatccggattagtcaatatcaacaaggtgtcaccttgtttcatcatattcccttcttctccaacaatgcggtctacactgccgccctcacgagtatttactttgatggtaagaatgggttgcaccagtccttccacatctacatactccataaatttgtcgtcttttacttcggctatctgaatgttgtctgtttcgatacgcagtttgcgaggacctaatgaaaggcttatcacatagataaggaagataataaaggccagtgcagctatcatatagtagcgatagcggatgtaccacggtttcttttcaatttttatatccattagtttatgttttttgatataatttttttatttcctcaaatccgcaactacgcgcctaatatgatacagaagcgaaaagaatctgcatcgttagtaaaaagggggcacagtgcatcgaatgtcaccataaagacatataaatgccccttaccccaccatgcgacttgaggcaatacgcaaaatcacgactataagttgtcggtgttatccaaagtcattctggaacacattggcataagcattgttgcatgaatagatattcagcacatacttccttgatgtcctgacccatttggctggcacagagatgaacttaaagacaaacgtcttgatgcggcttgttgctttgagtccgaacctcttcacgtcaagcctcgccatgatgaatttatagaagttgcgtatgagtgccataagcagaagaaacaccgtgttttctcccataaaggattttggaagcctgttccagccgaatccgttattcatatcatcgaagatgcgttccttccctccacggaggttatagaattcgacaatctctttctcggaagactcgtagtcatttgtaaggatgcagcggtaggtgtattctccttcccacaggtcgagttcgccgtctatccgcttctgtctttgaatcacaagacggtatgccttccctttccatttctcgatgagaatggaggccagctcaaactcaatgccgcccaattccactttcttccaacctctgagggcaaagatgtcattgtagagcgaactgcatcggttagcacggatatagaaggtcttgcagtgtttagcaatctcttccactatctcttcagaacacgagccgcaatcagctctgaaacggttgataataagcttgttttgttcaaacctttcaaagaacctcttcagcgtgtccttctggtggaaacggacatttgtgttgccgtcgctgttctcaatgccgacaatcaagttgccaataaccgccacgccagggcgataaccaaggaacttcttgtatgtaggcttcgcatcaaacttctcagcctctatgaactggtggtcgaagtcaacgtcatacccctcgccctctttcagctgccctgtggacaataggcaattgaggagcagtgtattcagcttgtctgccgtgttgaagtcgtaggtcttgccagtgtcggatgtgtaggaaatgttatcctgggtcagttcctttatggctctaagaatcgtgtcggcactgcatgtgcgaagtgtcggatgaagcgaaaggtggtacatcagatgagtggtgacatcctcgatgcatgagccgccacaaaaataaacgctcataagcgaacggatgatttcgctgtattgataaccatacagcctgcatctcataccgagggttgagtcgattacagatgagagtctggagtcaaattgctccattattgaaaatattcctccaaaaggagtgagtttctcggatttaattgctacctttgccatgtctgtcgggtttgatacatattttgatttgcaacactaagataggtgaaaaatctgacatggcaaattcctgagcaactttttgttgctcaggtacttaaaaagttatatttgtaatagtgttgcggaattaaggtatttcttttttaatgcatggcgataatacaaaggtcatttatacctgtcgtgtagttaaggtttaggtatagtacatgaaatctctgcttttctgaggaaatcatatcccgtcatacttctaagaccataatacagactccaataagttttcaaagctgttatataatttctccgtgcggtatctttttctgtaatggcggcattgaggtccaggattgtcgattttcccaagatataaagccgacgtgctacatcatggcgtcggtcggccgtcttgtccgtcttggcggctactgctacacggtatgcttgaagattgaactgacggaccattttacatacattcaattcaaaatctttcattccctgttcagcttgtgtatctactaagtctacattggaacgagctacacggacgcgtccttttccacgaccccaatctaggataggtaaagaaataccaatactggcatattgttgattcatggggtttcggtaagaatctgcaaatttatttccggtttgagaaagcccgaattgtacatacaggtcagctttcaaacccgcattggcttttgcagaagctaatgcgctgcggctttccaattgtttgcgtttataagtgtcagggtcgggactgtttttgaatgccagttgtaatgctttttgtaaagagatttcaaattgaggaatactgttttccggaacaactcgtaaatttatttcccgattaatgccaaggaaggaacggagtgtttgcatttggtcctctacttcgatacgggcattcatcatattggtttcttctgtcagtttgtttatttccagctgtagcatttcgttttcagttattgttcctatattatatcttccttcggcatatctgtataaagtatcagcagaagcatagttgtaggtagctatgtcaagattggtttgtgcagtagccaagttgaagaaaagagtgctggtttctgaggctacaagttccaatgcttctgcatatgctttacgggcttcccggtagcgaaggggttcgatacgacgatcccattttaaagagttatatccaaaaagttgctgttcgtaacctattactacgggttgggtgttatacgctgtatgattatcttcaaattcatcaatgcgttgggtggtactttttacaaacaagctgccaccggtgaaccatatattttgatttattttaaggctgaggtctgtgcttaactggtcttgctggataaattggtttgttccatccggttgggtaattttgtttatctcccgattcagggtaggagatgaagttaatgtgacggagggaagataattcgcccggaaaaaacggtagttccaataagctgcccgataggtatgacgggcagcttgtgcttccggtgagttttcttgtgctatttcaatagcttgttgcaaactcagtgtcattaattcttcttgttgtgctgcggctgtttccgggcgaagcagaagggaaagtgctataatacaatatagtttcatgttcgtttttttatgtctttatacctattagtatttttgtcttatagttagggaaacaggaacgagtcttcagtgtctttttcggataagtcgctttttattttggttaatgcttcctttgctttttcatgaccgttgtctatagctttttggaaccagaaccgggcttgttgtaagtctttctctacgcctttaccccactgatacatgcgacccaggttatattgtgcaggagcattcccctgtaaagcagctttagtcagccacttggctcctttagcaaaatctttttccattccctcgccataacaatacatatttcctatattatattgagctatcggattattcttatctgctgcttttttaaaccaaaaataagcttcttcaaagtctttgggaaccccaagtccgtttttatataaataaccgatattgttcatggcgtccgtattaccatgagccacagaacgtaggtaccaagtcatagcaatgtaacaatctttacgtactccccaaccatttttataaaggctccccataccaatttgagcttctggatttccttgagtggcagctttgttcaaccatttgaatgcttggctgtaatccttagtgactcccaaaccatatgtgtacataaaacctatattgttttcagcataagtgtttccgcccgttgccgattgatgaaaaagtttcaaagctttatcataatcaatttcacctcctaagccttttaaatacatgtcgcctgtcagatattgggcatgatgggccgtatcaatgcgagctatcttttctaataactcgcgtgctttttcatattgtcgattgacatagtgggtttgtgcttcttcccacaattgacggcagtcacctatataaagcatatagatcttattgctggatagaattactatgcttgctacaaggcataaactgataactattattgatttttttttcataacttaatatattagtattatagactaatcaaatagtgtgccattatcttatctctttgtttaccagaattttgtgggctaaaaaataaaaacgtctctgtgcggatacgcacaaaaatagtgcgtattcgcacagacaacacactaaaaaaaacaatatctttgcaaaatagcggatagaaaatcttttattcgtataataatgtatatgaggataaaataatgaatacaaaaggaaaaatattgattatagatgataatgaggacgtgctttttgcactaaaccttttattggaaccctacgtagaaaaaataaaagttactactcaaccgactcgtattgagcattttatgactacttttcaacctgatgttattctgcttgatatgaatttccgccgggatgctatcagcgggcaggaagggttcaattgtctagaacaaatattaaaattagacccgcaggctattgtcttgtttatgactgcttatgcagatacagataaagctgtacgggctattaaagctggagctattgactttattcccaaaccttgggaaaaagaaaaactacttgctacgctttcgtcggctatcaaacttcgtgattctcgtaaagaggtcaggcaactgaaagaacaagttgtagcattgagcgggcaggatgaagagatgcctcagatgatagggcactcagcgcctatgcgagaggtttttgatactattcggaaattatcggatactgatgctaatattttgatattgggtgaaaatggaaccggtaaagatttggtggcccgttctctacgttatttttctcctcgtcgtgaatgtccttttataacgattgacttggggagcataccagaatcattgttcgaaagtgaattgttcggctatgaaaaaggggcttttacagatgcccgtaaagcaaaagcgggacgtatggaggtggcatcaggaggaacgctttttttggatgagatagggaatttgtcattacctatgcaatccaaattgctaacagccatagaaaagcggcagatttcacgtttgggagcaacggatataattcctattgatgttcggttgataagcgcaacgaatgtaaatatccgacaattggtggaggagggcaatttccgtcaagatctgttgtatcgcatcaatacgatcgagattgccattcctcccttgcgggaaaggggagaggatgtgctcttattggctgattatttcttacaacggtatactcataaatataagaaagagataaacggactgaaccgcgaagccaagcagaaactcatgcgttaccattggccgggtaatgtacgcgaattacagcatgccatagaacgggcgattattctttcggactcgccattgttaaagcctgcaaatttcatgttgcagccacaacccgagaagagggtgaatacggatgagatactgaacttggaacaattagaacgcaatgccatagaacgtgctatgaagcgcagcgaaggaaacttgagtcgtgcagcggaatatttggggattacccgttacgctctttatcggaaacttgaaaaattaggtttatgaatcgtttacaaactttacggatgatagcttgtatgttactgatgggggtagtagctatagctgcatatctgttttatcaacattcactctatttttgcttgttattttcgctgatgattatggcaagtattatcatctatatctgtcagtggcaatataaaacgacccgtatgatatcacgaatgatagaaggtattcgttatgcagatttctctttgagtttttctacccagcacaaaactcgtacagaacaacgattggcacaagaaataaataatgttgttgctgaattccgtactcggttgtccgagaatgaagagcgatatcaatattatgaaacattattgaatactgttgacagcagtttgctggtagtagatagtctgtgcaatatacattggatgaaccgggccgccatgcaggatttgtgcggctattgtattcattcagtcagggaattggctctgttaaattctgaatttcctactattatcctgtcattacagcctggagaaattaaaacagtacgaatacataaaggagatactctacaagaattggctgttacggtatccgaatattccgctcaacatggtacggaactccggttagttaatttaaagaatatccgtgctgtattggaggaaaatgaaatggaagcatggcaaaagctgattcgtgtacttactcatgaaataatgaactccattgcacccattatttcattaagtgaaacattaagtgagcgtgctgtgcaaaatggtatgaatgagaaagattacaatatcatgttgcaagggatgcagactattcatagaagaagtaaaggattactgaattttgtggaaaactatcgtaaactttctcgtctgtctgtcccgatactggctccagtaaatataggtgagttgttgagtgatatgaaaaaactattccctaataaaaacatacaatatatatataaagtagaaaacccagaaacgattctgatgctagatcgttcacagatagaacaagtattaatcaatttactaaagaatgcaggtgaggcttgtgtagagcaaacctatcccgaagttattattagtacacattgtgatttagacaaacatctatttttcctttctgtctgtgataatggtagtggtattcttcctgaagttttggataaaatctttgttccttttttcacaacgaagtcgacaggtagtggtatcggactcagtttatgcaaacaaattatgaatttacatggtggaagtatctcggcaagtagtgaaatagggaaggggagttgttttacactgaaatttctttgttgcggatgaaaaaaatgaagttaatatgctgatttataatttaataaataatagcacgaaaaaaaagtggaaaaaaatcacttcaaacgtttgcacatataaaaaaaagtcgtacctttgcatcgtttttgagaaacagagcaattgaaaaaataaaaagattcggggtgtagcgcagtccggttagcgcacctgctttgggagcagggggtcgtgggttcgaatcccgctaccccgacaaaagaaaaaggctttgataatcagtggtttgatgctgttttcaaagccttttttattataaaaatcttcattttattgattaaaaaaaaggaatttttgcccatcaatggacacaaaaacttatccaaaacttatcctttaattttaatcagtatggcaactctcaaactaacaattttcaaagcaaaagttttaaaagatggcagacataaaattagagtggccgtttgccataagcaggaaacttgctacattatcactcggtttatcatagataatctctcccagttcaagaacggacaggtggtaaaacgcccggatgccgcaatgataaatacaaaattgcgtaatcttctcaataagtatcaggaaagattggacaagatagataatctaggtatctattcatgtacacagttgaaggatttcatcttaagggaatctgtggatacacagggggaatcatttaagtctgtgtgtgatgcatatattgaggaactgtttaaaaacagtaaaaccaactatgctaatatgatgagggaaagtgaggctcatttcttgaagttcctgcgtggggatgtacgacttgtcgatattaccccggaacttatagagcaatatgcagcgtatcttgagaaaaagaattggagccgggcgacattggggatagtaatgagaaatacgcggacaatcataaacagggcgataaaaaagagaaaggtttcatataatgtacatccttttgtagattattctattccgcaatctcctgtacgcgatgtcagtatcaggctggagtctttgtccaagatacttaatgctgaggttgacagtaattatctgtcagtagccagagatttgttctctctttcattttatctcggaggtattaatatgactgacttgatggatatggattttagaagctctaggtatatacaatactcccgtaagaagattatggggcggacttccaatgcaaatgtcattatattgcctgttcacgagaaagcagcctgtattatagcaaaatggatgaacccaagaaccggtaagctggattttcattataatttcacttataagaatttctctcgtcatatatcacggggaatagcgaagcttgcaaaggaacttgggataaaggaacgtgtggtttactactccgcccggaaaacctttgcacaattagcttcagaactagggatacctgatggagtgatagactactgtttagggcattcggacaagagtaggggagtgatacgctattacgctaaggtaaaggagaaacaagcggaaatagccatcaaccgggtgattgattatgtggaccatccggagaaatataaggagtttttggaaatgagagcagacataatgctgatgaaatcctaactcaaaaatcaagcggttatctataaaatatagccgcttgattcgtttatcgaggcactataaaatattttgtgtaaatggaaatacgggattcagaaatgagtctcgtattttttattttatacatttgcaaaatgaagaagcttatgaaagaaaagaatcaagtagtgcctgatgaggttttaagcaagtttatcagtcagttcaagacagaagccgatgtgagcaagtttctgaagcagttgcatgcccaagtattggaaaagatgcttgaaggtgaaatggatgcccatttgggatatgaaaagaattctgtgataggaaataacactggcaactcccgaaatggcagttatccgaagaaaatccaaaccgaacatggagagtctgtcatttctattccacgtgaccgtaacggccagtttgagccgatagcagtgcctaaacatgaaagccgtggactttctatagaaaagctcgttatctccctatatgccaaaggaatgagcgtttctgacatagaggaagagatgcgtgagatttatgaaatagagctctctacatctgccatttccatcattaccaacaaggtcaatcaggctgcccaggagtggcagaaccgtccccttgatcctgtttacctgatagtctggatggatggtattgtcttcaaggtacgggataacggtaagatcataaacaagaccgtttacctttgcgtcggactgaaacagaacggtctgaaggaagtccttggcatgtgggttggcaaatcggaaagctcttctttctggatgggtgtcctgactgatttaaaagcccgtggggtgcaggatatcctgattacctgtactgacaatctgaatggatttacggatactatccgcagtatattccctcagtcatccactcaaatctgtgtggtacatcagatcagaaactcctgtaaatatgtggtttataaagataagaaagagtttacggcagatatgaagaatatctataatgcacccaacaaagaggttgcagccacagaacttgacaatctggaaaagaaatggggaggaaagtatccttatgctatactttcatggagaaacaactgggatgatttgactgttttcttccagttcccgctggaaatcagaaaaataatctacacaaccaatctcattgaaaacctgaacggaaaaatcagaaagtacacgaaatcaaagctttcattcccttcggatgatgcagtcaaaaagaccgtttatctttcacttatggagattgagaagaaatggacacagccgattcataactggggcttgattatgaatcaatttatgcttatttttgaaaacagaatccagatataagaacaaacttacagctgaatcctgtttccatttacacaaaattttggacagtgtctttatcgaataatagaagaatatcatttattgttttcaaggttctctccgatttgttggagcagtctaaaagctccagccatcttatagttacccaaacattatttagcctgcatgatgcaactttcaacagtaagtttcaaatttggtgtgaaagcgaatttatttatctgcatttccttaggaagttcattggcatgattattgagccatacgatcatttcatttaatttctcttcggaataagatttctttttcaccatgatacataaattcatgtcaactgtgtacaaaaataaaagaacatataattcatgggttatcttttaacagaaatattatcaaaataaaaccgtccctacttatcacaagccggaacggttcagattagtttcgtttttgacaatctacttcacattttattgaacaagataccaatggatttgttcaaagggatttcctatttctaaaaatatttgttgtcacattattacgtattacaaaaaaggagggcatcgtgtattacgacacacctcctttcatctcttaaactgaagatttaggagttttcaaatgcgagtctctataaaccagttattggattccacttaacaatttaagatctatatcacagttcttcaatctcatttttagacaatcctgtggcttgtgaaataatgtcagataacacacctaatcttttcagattacgggcattctctcttttctcttcctctctgcctttcactaatccttccgctctgccttcctcccgttcagtatgaatgttatcacgaagaatgatcaaattgtccaaatgactgtaataagcggccagttcatccttggtcatgctatctagtttcaacttctcacgggcctcttcaagaccgggagctgtagcagtggaaggtatttcaccggtattcaagtaataaatccattcttctagagggctttttggggtcagcggattttccgggttggcaagctttcttttaagcgtatagcctagccagtctgaacatgaagaacttcagatcagccacccctcttaactggcttcgaaaagctttgattttagcattgaacgactccgctgaagcatttgtcaatcgttcttcaaaataatttatgatggtcgtactatggtttgaaaaggtatcaagtaccttgttgaactccatatagtcaaacttttccacttcattgtaccatcttgcgagatttagccttgcttcatcgggacctgacttcttgttgaagatgtctgtcagtttcatgctaaggctgtatccttccagaagcttggggaatttatcaaagagaatggcagccctggtcttttgctgttcattccatttgctccagtgtttcagtataatatgcttgcttctgcttactatctgtggcagggtttctccgttctccattctttcaggctcccatttccctattctctccctttccgccttactctttgcttctttcttcttttgacggtgctccctgatagcctgattttccgcatcaagtactttccaccgatagcgtattcttaactggtctacagcttcagacatgagctgctgtacatgaaaacggtcattgatcagctttgcggcaggaaacacctttctgaccgtcagcatcatggctgaagataaatctgtagtgacagtcttgacagacagccgtttccggtgcggaagcctgcgcaagattccgcttaccgcatctgtggccactccacgaaccattgcaactaaagcccccttacggcctttagctgctttattggtcagaatcgtataaacatctccattgctcaggcaagtttcatccaaagaaaggttttctccaatgttttcaggataaaggaggtagtcatgcgcatgttcgagttggtcccagttccggtaatcactgattttctccttgtattgtttacgaagagtctgcccttttacgccataacgttccgcaagcacacagatactcacaggagtagattcaatctccttcttttaaaaaagaaacgaactcagaattcagccgtgtaccgtcaaattcggataaatcccagtcatagctgaagatttcattggaagacttgtcaagccatttacgtttacgaacatggagataagtggcgcgaccacgaataggatagtcttggattgtacggtactcaccaaaaccataggatatgatatccgggttggtcttatcttcttttagctgaacttttttttcatcaagataaatatcaaaacggtcagcactcttgtcgaaattgacaatatcaaagttgtctataagcacatccggaaggatggcacgaaggagtcgttcgggtttcataaaacaaaggtaagcaaaggtagctaattttaaaacttaacaaccagaaatttccgctgagccgctttttgctacctgattaaaaccgttcactttcaggatatagtattcgggatataactggctgaccacatccactttaaaagtctgtttctggaatgggctgagttcaagaagatcattagtgtgaatgcccctaaattccgtctttccatgataaacgaaatccctgccatgccctaaggagaagtagactatattgacgctatatactttacgaaccttgtcataactctcccctctgttgatatactctgtgactagtttggaagtaccgaacaacatacgctggaaataagcgtattcgctgttgttctgtacctctatcagtattaactcacctttggagtcctcggcaagcatatcaacacgattgtatttgtcgtactcattctcctgattgctttcgctctcaagaagcctctggataataatcttctcacccaataacgtggtgagaaggccttcaagcacactgaagttggctttgtttctgagcagacgtttcatcgcccagtcgaaacgaattatctgatttttattattgctgttcataatgatctgatatattggttactacaaagataggcaaaaaaactcaagacctccaaaataaaatgataaaagcgaccattctcaacaaatcgccacttgtggatcaactaattcattttcattatgaggaaaatctaaaaaaatcttttgatatatcctgttcaatgattctgcgtcaagttcgtctatatttactagatataaggtgtctgtcacatacgctccactctcactaagaaacacatattttgcgtcaagggaccagtcttctcctgttactaccatctttattttaatgtcattccgcactttacagacctttttaatttcttctatcagttcagctttattcatattcttaactttccatagtttatatctacaaaggtaatctaattttttctcctcaagataaagcttttaaaataagaataaaacaaataccgacaacgtagcacctaaaaagcagatcaatagtgtaaaaaagcagctatccatcacgggtaactgctttaaaatggtttaaaattctataaaccccataagtaaagtcatttatgagagagtctatgcttccttgcaaagataaggataataaaatcaaatactactaatacattgttttttatttcttttagatcttactggaaacaatcatattcataaaataacttcaaaattttatcttattggagggtttttataatgagtattgtttttattaaccaaaatatatatctttgtacccttaattccgcaacactattacaaatataactttttaagtacctgagcaacaaaaagttgctcaggaatttgccatgtcagatttttcacctatcttagtgttgcaaatcaaaatatccttaattccgcaacactattacaaatataactttttaagtacctgagcaacaaaaagttgctcaggaatttgccatgtcagatttttcacctatcttagtgttgcaaatcaaaatatgtatcaaacccgacagacatggcaaaggtagcaattaaatccgagaaactcactccttttggaggaatattttcaataatggagcaatttgactccagactctcatctgtaatcgactcaaccctcggtatgagatgcaggctgtatggttatcaatacagcgaaatcatccgttcgcttatgagcgtttatttttgtggcggctcatgcatcgaggatgtcaccactcatctgatgtaccacctttcgcttcatccgacacttcgcacatgcagtgccgacacgattcttagagccataaaggaactgacccaggataacatttcctacacatccgacactggcaagacctacgacttcaacacggcagacaagctgaatacactgctcctcaattgcctattgtccacagggcagctgaaagagggcgaggggtatgacgttgacttcgaccaccagttcatagaggctgagaagtttgatgcgaagcctacatacaagaagttccttggttatcgccctggcgtggcggttattggcaacttgattgtcggcattgagaacagcgacggcaacacaaatgtccgtttccaccagaaggacacgctgaagaggttctttgaaaggtttgaacaaaacaagcttattatcaaccgtttcagagctgattgcggctcgtgttctgaagagatagtggaagagattgctaaacactgcaagaccttctatatccgtgctaaccgatgcagttcgctctacaatgacatctttgccctcagaggttggaagaaagtggaattgggcggcattgagtttgagctggcctccattctcatcgagaaatggaaagggaaggcataccgtcttgtgattcaaagacagaagcggatagacggcgaactcgacctgtgggaaggagaatacacctaccgctgcatccttacaaatgactacgagtcttccgagaaagagattgtcgaattctataacctccgtggagggaaggaacgcatcttcgatgatatgaataacggattcggctggaacaggcttccaaaatcctttatgggagaaaacacggtgtttcttctgcttatggcactcatacgcaacttctataaattcatcatggcgaggcttgacgtgaagaggttcggactcaaagcaacaagccgcatcaagacgtttgtctttaagttcatctctgtgccagccaaatgggtcaggacatcaaggaagtatgtgctgaatatctattcatgcaacaatgcttatgccaatgtgttccagaatgactttggataacaccgacaacttatagtcgtgattttgcgtattgcctcaagtcgcatggtggggtaaggggcatttatatgtctttatggtgacattcgatgcactgtgccccctttttactaacgatgcagattcttttcgcttctgtatcatattaggcgcgtagttgcggatttgaggaatatgtatcaaacccgacagacatggcaaaggtagcaattaaatccgagaaactcactccttttggaggaatattttcaataatggagcaatttgactccagactctcatctgtaatcgactcaaccctcggtatgagatgcaggctgtatggttatcaatacagcgaaatcatccgttcgcttatgagcgtttatttttgtggcggctcatgcatcgaggatgtcaccactcatctgatgtaccacctttcgcttcatccgacacttcgcacatgcagtgccgacacgattcttagagccataaaggaactgacccaggataacatttcctacacatccgacactggcaagacctacgacttcaacacggcagacaagctgaatacactgctcctcaattgcctattgtccacagggcagctgaaagagggcgaggggtatgacgttgacttcgaccaccagttcatagaggctgagaagtttgatgcgaagcctacatacaagaagttccttggttatcgccctggcgtggcggttattggcaacttgattgtcggcattgagaacagcgacggcaacacaaatgtccgtttccaccagaaggacacgctgaagaggttctttgaaaggtttgaacaaaacaagcttattatcaaccgtttcagagctgattgcggctcgtgttctgaagagatagtggaagagattgctaaacactgcaagaccttctatatccgtgctaaccgatgcagttcgctctacaatgacatctttgccctcagaggttggaagaaagtggaattgggcggcattgagtttgagctggcctccattctcatcgagaaatggaaagggaaggcataccgtcttgtgattcaaagacagaagcggatagacggcgaactcgacctgtgggaaggagaatacacctaccgctgcatccttacaaatgactacgagtcttccgagaaagagattgtcgaattctataacctccgtggagggaaggaacgcatcttcgatgatatgaataacggattcggctggaacaggcttccaaaatcctttatgggagaaaacacggtgtttcttctgcttatggcactcatacgcaacttctataaattcatcatggcgaggcttgacgtgaagaggttcggactcaaagcaacaagccgcatcaagacgtttgtctttaagttcatctctgtgccagccaaatgggtcaggacatcaaggaagtatgtgctgaatatctattcatgcaacaatgcttatgccaatgtgttccagaatgactttggataacaccgacaacttatagtcgtgattttgcgtattgcctcaagtcgcatggtggggtaaggggcatttatatgtctttatggtgacattcgatgcactgtgccccctttttactaacgatgcagattcttttcgcttctgtatcatattaggcgcgtagttgcggatttgaggtgtactagattgttttaagagatagcacttggtgaagtgctgacataaatcgtttgttagatttgtaaaagaagacggttgtccatgagaataaccgtcttctttctttgaaagaaatataatttcacaatgtcgtgcaaattatcagagcatttcataaaggatatgtatgttatagtggttgcttgaattttagctcattgaaactgtctgcattattaccagtggattggatatatgtattgctttaaataagcatattataaaaaagcaaatacattcattatagtatgagatttggtgtgttttttcatttcaacaacaggcttaggttacataaaaaggttcaaactgtgtatttgcttgcaaatgatatctattttaatctttgttatataaaaaatgcacttctactttcccaagtaaaagtgcatacagattttataataaaagattgaatctaaatatagaaatgaaaaacacaaaatgccataatatcatcacgaatgatggcatttaaacattgtcagtaaacgcttttactgattcatcaaatctattacttgtttgtcatagcaaagttataataaatattttaaagaaaaatcttatgcataaaaaaagcacagaacaaactatatatagaccaatatacaacacatttaaacaatgttgtgtaatacaggaccattgacacaagccattctgaaagaacaaaagaaaagtgcatgactggtagccaatcccaaagggtatgtgattgtggttatcaaaagaaaaaaatctaattaaagtattgttagaaaaatagtatggccaattatttttaattttgttttttaacaaacaaaatgcgtatgaaatatttatcattaatagctattttttcttttgtatgctttactggatgcggaatttctgatgatgcaagaactccgagcaatgacgaatctgcgacttactatctatgcaagtattggtggcatgccgaatatgttgatgtacataacacaagatatattcaggaacttgattttcacaaggacggaacaggagtagaaataataggcaaacatcagcaagcgaatggtaattccacaagggaggaatatcatttcaaatggaactggggaagttctcataaaacaatttctgtccaatatgatgaaggcaatgctgtattcatggataatgtgtttatagcagatagaaagttttcttataagatgatgggcgaagaatatttttttgacggatttaataaaagttataattaagatattaagcgagtttactgtcatatcagtaactcgcttaatatcattttttctcctgtttttgataatattcataatacctcttgtagttgttcctttccttagcttcatccacccataggtaacatttagagtataacaaattagtctttctcttcattgtatggataaaattcaacatattctttagacataagtggatcgttcagttctcctgttctatcgtagaatgaaaagattgttttatccagttctttaatatcccaataatgactaccaccaaagtataatgtgctaaagttaggagtgtagaaagaccatcttccacgaatctcaccttcttttttgttcccatctttatcaatctctacattggttcgtgtatatgttccgtctttatcgaaattccaaatagattcccaagagcttccgtcttcatactcttttttcccaccagtccaagttatatcacatattagtgcgattatgctttcttctccactgttataatatccttgtttctcaacacaacaggaaagaaacaccatttgtacaattactgcaaaaaaaacgattattcttttcataattatcatattaaaccatgcaaatatagaaaatcttttgtagtattgatactttataaatggcacttttactatatttgtacaaaaaagaatagaacaaataaaagtaaatacagaattgtaaaattttataatcgtgaaaactcaaaaattagaaatactgatattattcctctgtatattcggttttataggctgtgacaacaaagatgaagagggtgagaaagtgacaaactacaaggaatatactctgaccattgcatcgaagaagatacccggtgtttgtcggtcagacagatttaattatttatctgatgtatatgccgtaaagaaagaaaatgtccaagaatgggaaagccttggattcattggtggatttgagtttgaaaaaggatatgaatataagataaaaatcagtgaaacaagttatttggattatagcatggaaaattccgcatggacggaatatgaactacttgaaataatatccaaaaataaaaaagattcagaaaatttgcctttacatttaatccctgaatcatactataagaatatacagtttcctaaatacagatatgtagtagatgcagataacaatcaaaaacttattgaagaagaattggagaaaaaatctcttattcctttggattttcactatatgttttggcggagcgaagacaagttcctaagatgtattgcaataaaagatgataataataccctggaaccgtgtattataaaaagcgaaaacaaagacctaaaagaaatgccagaatcttacaaattacttccgccaaaagaaaacgtaaaaggtttcatggaatggacgtttttaaatgaagatgggaatgacaccaattacccttcatttgatgtatttttgggccgttctactaaaatggcttatctttataaagacctttctaaatactacaaaaataaatatccgcaagccggagtaaaaacagttgtagtttcttatattattgctatcaactaaaataaagcctccggcgagataattctttggaggcttcgtacatatatgtatacatgatttcggaaaatacacgtaaatacagaactggaaaattatgcagatatggatataggccttttacttataatactcattttcttgcttgatatagccgtgctatatagcattgtacgcacaaaaagcacataaggaagcagaatattatataccttgattgttttattacttcctgttattggaatttcaatatattatttaattcgtaaatagtatggaaagatttatctatctgataatcaatctatcaatgtggattattgtggtatgggccattgtacctatcattatcgatgatattaccattgattcaataatagctcgtttaggtttgggctctgcttgcatcgctaatttgtttcagaagaaaaagaatatcaatatatcactctttattgtatcaatagtgttaattattgctgctactattataaaaatatattaatatgagaactgaaaagaaaaattaaatataaaaaaacgtatgaaaagaatgaatctgaccgcttttttgttaggtggtgtctgtttgttatgccaaccactccaagcccagcagagcattgatgcttgtgacggtcgtacttacaaagtaggcgacacgctccgtattggtgaaccattgccatcgggctatctatttgttaagcaactaaacgccaacaatcaatttgacaagctggatccgaaaaactcaaccggacggattgccatcattaccgacatacctgcttaccagccagaactctatcaacagttcggtatttaccaacaaccggaaacgcctcaaatagtctttgccgaacaaggcgatttcaagattggcgtatatctaaacatggctttaagtaaaggaaacatcatgtccggacatcatgtttcctgtatgaatggagctgttgaccttactccggctgtcttgttcgtctatgcacataaactttacggtaaacctatcgacacagcatcagtcgaaacctatgcttctctccgtgccccccaacagtatacagaagcagccaatgacccgtttgcactggaagaactccgtacaacataccgaaaagaattggaacaagctgtggcaaatgcagatttcaatagggtattccgcatcaaatgtttatcggaactccaaatatatgacatcaatcaacagcgttttccgctttcgggcttaacgtgtatcgatgtgaaaaccaagcagaatagggaattgtcccaacaaggttattgcttatggggaacttgtgcctttcatttcactaatgctctgtcatttgctaccctgccttgcgataaatccattgcacaaggcatctatactatgcgtaaaatgacatcggcaaccttgtctccaacagctaccctatatgtatatgtgcgtattctccaacagccgatatcacttcccgataaacgtaccatggtgatgcgttccgaaacatcattcgattatgagtggtcaacactccgtaaagcatacgatcaaaaagctttaaacttggagattgtacaaacagacggttattacaacgccttccctcataacacacaagaagtgacatacaattaccttggtacgcaaacaatgcctaaaaagtagtacaatgagcaatatgcagacaaaaactattaaggaacatggcatattataataacagtttttatttttatattcaataaacttctaaagcaaggagcagtaaaagaagaaaagacatttcggaaatttgattgtaataaatgagctatgcttccggtggggtaactcgctgggggcttcttacattttctgttttcccgatcaattttataaaactgctgtcatagtttgtattttcgaaaaagatgttatatttgcaaatgaaagaattatttggcagcatagcaacgttaaacgctaaaatatgtactgttgctaaatcgttatttttatttctcaaataattcgctaaaagtctattcatcaatcggttaagtcaaactgataaaaaaactgagatagattaaatcaagcccttgtgctgtatttccctatttgtcgcttgtttgatgtgtcacctacgagtggatacaatcaaggacaagaacaactacaaacggtattatgaatattttcatgaaatagatgaataaaaaaacaaagagtagtaattccagttttcataagttcaataatacagcatgattatatttcttagaatcccataatatttccgtcgtaaacaactcttttccactattttgggaacaccaccctatcatttcatatttatgtttatagaaactaccgtatttaatcaatcctataactcttacattatcacacatatcttctaaaaaattaaaagaaccatattcatcaggaattcaagttgatgcaggatttaaagaaaccaatgtactttgtatggttacgcttgatagatttggaccagcgtaagatagaatcatggtcgttttagatgatacagcagagctactatgacttccatatattgggaaagccatggaagttcttgtataatactcaaggtttttggcgtattttcccgcttggagtcgtgggctcaaaattgtcaaactcaataccattgctcatgtattccaaaaaagtcttagctctttcatagtccatctccaaaagttccttatcgcgttgctctatactaactgttgtgtcaagttcccaaccataagaatcgaatagtttcattaatgcttcaattttggctttttcttgttcggaataattgttgttgtttactactttttcattggaacatgaaaccaagcacgatacaaaagaaaaaacagttaccaatgataataatttttttttcatatgccttttatttttgaagtttaatatgatacaaatatagggaataaattactatattattttatgtaacaagatttttattccctatagttgtatctaactagaacttcttttattttctttttgataacctcaataacatatcctttgggattggctaccagtcatgcacttttcttttgttctttcagaatggcttgtgtcaatggtcctgtattacacaacattgtttaaatgtgttgtatattggtctatatatagtttattctgtgctttttttatgcataagatttttctttaaaatatttgttataactttaccatcacaaataactgaatatgtgtttatttttagattcattaaacttggatattgtaaagcattttgctagcaaagctgtttgtatacggaatccggcaggattagcgaatcctgcttttcttatatcgcatttcagcttcaaattttggcaaaataagttatatgtttaaatatcagtaaaagagtttactgatgatagtcctgaatgttgttgttcgtgacgaatcactacatttttgttttcatttatttgataaatttagattaaacatttttcattgaaatcaaaagagataatacacttttgcttgagaaagcagaagtgtattttttatctgtaaccctaaaaaaagtttattatttttttattttgagcatttgttcattatctttgcaggcagaaacaataaatatacaatgtcaccacgtccaaaaaatatacgcaaagttaacaatatgccttctgttgccggattcagacctgtcatttccaacaatagttgtgaagaaacaatattcctgcatttcgaagaatatgaaacaatacgcctgtgtgattatgaaatgaaaacccagcaggaagcctccatctcaatgggtgtgtcacgccctaccctcagccgaatatataccagtgcaaggcaaaagatagccaaggcattcgtctgtggtgccgcaataatgatagaaggaggcgtgtcatataccaacagtgaatggttccgctgcggatcatgtggtttcttgttcaacaatatcaatccggcactcaaaatccgtaagacagtatgtccggtatgtctttccgaagacatccacaccagtaatattaacattaataagaataagattatgatgaaaattgcaattcctaccagagacaatgtaattgataaccatttcggtcattgtgagtattatacaattctgacagtaggacaagacaaccagattctgagcagtgaaaccattccgtcgccacaaggatgtggctgcaagtccaatatagccggtgaactggaaggtatgggggtcagtgtcatgctggctggaaatatgggacaaggtgctttgaatgtacttacagcccaccatattaaagtgataagaggatgttccggaaatattttgaatgtcgcaacggactatctgaacggaaaaatagcagattcaggtataggttgttcatcgcatgagcatcatcaatgccatagtcataatgaataaaaagtgatattcaataataacaaaatggggctgtccattttagacaaccccatttaaagagacgcaaaatatattatttcagtatttcacctttttcattgaagaacaccgtactttcagttccttccttgtctgtcagaacaacctgataggtcttactgccatcctctgccgcttctactgctgcttccttaacggttgattccgcaaaatttttggcgattgcttccgttaccgctgccggaaggtctttcacttcaataggggtaaagtcatttactgccatgactgtttcaacacctgaggtcaaattttcggcaaatgccactgttgttcctaatcccattaccaatgctactgcaacaaaaaattttttcataatcttatatttttaatggttattgttttacgataatgataggacaatttttatgccaaaagaataattaatctgattatcagatggttaatattctgctaattatatgtgaaatggaaaaaatcctcatatagtgtgggatgatgtggaaatgttccacattgatacctttcttccattaatcttttcgcacctttgcggaaaaatggataaaatcagataccgtcttgtatataaccgccagaacacacttaacaggcagggcacggctcttgtacaggttgaagcctatttgaaccaaaggaaaatctacctgaagaccaatgtttacctcaaaccggagtgctggagccgtgagggggcacaagtcataaaccacccccaatctaacgaactcaacgcaatgctctatgaatacatcctgtatctgcaaggcatagagttggggtattggaagcgcggaatacctgccacactctcactgctgaaggatgctgtcaagaagaaaagtgccgtgaatgtcagcttctccactttcgccaaatcagccattgacaattcggacaagaagcagtccaccaaggacaacctgcactcgacactggcggtcctgcatgatttccgttccggattggacttcaaggatcttacctatacattccttcgtgattttgagcaatacttgagagaaaagggcaatgcggtcaatacgatagccaagcacatgagacagctccgtaccttggtcaatgaggcaatcaaccagggatatatgcacgcagatgcttatccgttcagaaagtacaaaatcaaacaggagaagggcagacatgagtttcttaccccggacgagctgaagaagctggaaacggtcgaggtggaagaggagtccatgcgccatgtgctcgatgccttcctgttctgctgttataccggattgcgctattctgacttctgccagctcacacctgagaatttcattagagtaaacggcaaacggtggctgtacttcaaatccgtcaagacaggggtggaaatccgtctgccgttacatctgctgtttgaaagcagggcattgggcattcttgaccgttatccggatatcggaagttttgccgctttgccttgtaactcggaagtgaataagcagcttcgaaagctggccgggttatgtggtatcaaaaagcggataacctaccatgtgagccgtcatacctgtgccaccctgctggttcatcagggagttgcgattacaacagtccagaagttgctcggacatacttccgtaaagaccacacagatttattcagaggtactttccagcaccattgtgcgtgacttgaaaaatgttcaaaggaaaaggaaaaaagtaaagatgtttcctgataaaggcttgaggacatctgattttatagacaatcggtagatttcatgaatcctatttgttttctattaatattgtgactctttaaattcttcggataatcggaatattgctcctgattattttttcaatatggattgaatatgaatagttttcactatctttgcagttgtaactaggagcttgatggcaataaatattgtcatcgggctctttttttattgtctatctgttaaagtaatgaaatcccccgtctggcttcacagtctgacggggggaagttaagtccaatactagttttgaaagaatcaggttaacaaagtcttgacaaagatagtgaaatatgaatagtaagcaatatggatatggatttattttgcatatatataaaaatcccggcaatcttctcagacaaccgggataatcaaatcatactgactaatgataacaggacagtaagattaaacaatttggtaaatatagatccacattttctttataggactttcaatatggcggaaggatcatggatgaaccgtcacagtcctaaaagacaattgacaaaaatagtaaaacaaaccatattgacaatacattttttggaaaaactgccagctttctcaaaaaacatagtagctaaagaataaagaaacaggatgaataatttatcatataacaattaaacggtgaatgtgatggaaatagatattgcaaacattattagtgctgccggaacattgctggcagcttatttcgcctataatcagtatactaaaaacaaactgactgatttaaaagtggaatattttaaaaaagaggaggaaaaaagaagttaccaccgcagtgagaactccgccaaggtgttcggtgagctgtggcgtgtactttatgaaacgaaagcagacagggtatatatcgtacaaccccatcctttggggtatatagcttttctttcggtgcagttcgaggtaaaacgaaaaggtatagccggaatgcgtgaaaacatccaatcacttcccatgagtgaagtggccgtttttgcagaaaatctcgcaaagaatcttttcatgttctactcagatattgataaccaggttaaggataaggttgccaaatctctattatcaacaaatggatgcaacagcgtggctattaaacggcttaattcatctcaagattgggttggaaatatcttttgtgagtttacagatgaaacggatttgaatgaagatgaacttcataaggtcttgcatgaagcagcggttaacatacaatatatcctgccggaattcaaagaaaataaaatcgaataattataattaatgagtagtatggctgacgtaagaaaacttgcaccgtttatcctaaagtgggaaggcggttttgtaaatgaccctgacgatttgggaggagctaccaatatgggcgtgactatcggcacatggaaatcgtgcggctatgacaaggatggtgacggtgatatagatgtggatgatttacatctacttacccgtgaagatgttgttaatcgtgtactcaagccgcattattgggacagatggaaagctgacgagattaaatcgcaatcagttgctaatatattggttgattgggtgtgggcatccggtgcgcacggaattaagattcctcaacgcttgcttggtgttacggtggatggcattgtaggtcccaagaccattgccgctgtaaatgccaagaacccgcgtgagttgttcgacatgattaagattgcccggttcgactttattgaggatatatgccgcaagcgtccgaccaataataaatttaagagagggtggatgaaccgcataaatgatatctcttatgttggttagagttatgaactgggtaagccggcatatattactggctcccttcatgtgtctgttcctgctgttcggatcatgtggcagctcgcataaggctgtcaagtccgatgtagaagtaatcagcaaagatagcgccagtgaatctgtcaacatcgtacacggatcaagtacctctttgagcgaacttattaccactaatagtaactatgtgattgattttcgtatctatgatacccgaaagccgcccgacagtctgaccgataaacctccgttactggcagatgggcatatagaaggtgatttcagcaaaaatagaaagaaggaaactgcaaccaaagacagtacggaggtgaaagccgataaggatattacttctgatatttatgaaaaaaagcgatcagaaaccataaaagagaaaaaagaatccacgctgcttaaacaaattggttttgcctgtgtttatgtaaccgttttgattgtcgttatgctgatagtaaagcattggtgcaacagacaatcttcatcataagactttaaatttataaattggactgccccggctcgtgatgagtcggggtatttgtttaaatacaatttcccaattggattacacaatcaactgaaaagaatagaattttgcgtatctttgccctgtgattttggagtagaagccaatctcataataaaagtttgagagggggctcgtaatgcacgatgccctccttttttgtaatacgtaataatgtgacaacaaatatttttagaaataggcaaatccttttgaacaaatccattggtatcttgttcaataaaatgtgaagtagattgtcaaaacgtaactaatctgaaccgttccggcttgtgataagtagggacggtttttattttgataatatttctgttaaaagataacccatgaattatatgttcctttatctttgcacactattaacatcaacttatgtatcatggctgaaaaaaaatcttattccgaagaggaattgaatgaaatgatcgcatggttcaataaccatgccaataaacttccaaaagaaatgcagattaacaaagcagctttcactccgaatttgaaacttactattgaaagctgtatcatgcaagctaaacaaaacttagggaactataagatgggaggaccgtttctgattttgaaacaaatcagagcaaatattgaaaacaataaatgatattcttttattatttaacaagaaaatcaagatattcttatccatttgcaccatcgctgccaaaacaccaaaatccattgtcatatcgtgacaatggaagaagcttgatggtaataaatattgttatcaagcttctagttacccaacaaagagtaatgaaaactattccatattcaattcatattgaaaaaaataatcaggagcaatattccgattattcggagaatgcaagaagccatagagcattaatagaaaacaaatagaacttatggaatctacttattttctattattacagaacaagattcagttttataaagaaatatttttgcacttatcgttcgttttaaccaataaaaaatacaccctcactttcccaagcaaaggtgtatataattactcatttaaaatggtatgtgaaaaaaattattaactaaaaagatgccattattcatcacgaacgatagcatttagactatttttgtcagtaaacgcctttactgatttagaattaagtttaattcaatatagatgctataaagttatatataaattttattttatcaaaactatttaaaaaaggcgggaatcaccaatcctgcctttttcaatacaaactgctttgctagcaagatgccttacaacatccaagcttaatgaatcaaaaaataaaaacacattcagttatttgtgatagcaaagctataacaaatattttaaagaaaaatcttatgcataaaaaatgcacagaataaactatatatagaccaacatacaacatatttgtaatatagggccattgatacaatggtattctgagaaaacaaaagaaaggcgtacgactggcagaaacccccaagggatatgttattggggctatcaagaagaaaactaaaaaaataattaaagtcttattactaaaaacaacgtaacagattattttctaaatttagggctataaatttcaaaatgagtgcttatgaaaaaaatattaggcagcacatcattatgtgttatgttatttatgatctcctgttctactattattacatcacgttctgatgaaatggaattgccagctgaaggccttcttgaaacaaacattttatctgaggatacctataataacttcttaaaatctctagaaggattcgttactcgtgatacaaaggtttacaattatcctgattatttcggtggatgttttacaaacgacaacgggatttgtgtctttcaaatcgtttccagcctaaataatacggaaatcataaacgagttgagaaagagaaccaaaagcaataacttctctattcaagaatgcgagtattcatattcagaactcaatgcacttctttttgatattaaagaaaaactattcgacaagagcttctatgaaacaaaagaaaagttaaaatggtatggatgctatttagatactgaaagcaataggattgttgtaaggttaggtgaatgtacagacgaatacattgcaaaatttaaaaatattgtttccaactcccctatgattaaatttatagaaggagggaaaaatattatcactatcccttcgaaaaagaaataatgcctccgttacttcccgatgaagcgactaaggcacaagaaacatgatagattttatgtagaagaacatggggttggttctggaaggactattagggataaatgatacatggtacaaaaggagatttggtgaaattactgattttaatgaagctaataatactggatatatgtttgtcgataaaacccaatcattggataataaacccaatacatcaagtaattatggattcttggaaacgattgctattaatgaggtcaccatcaagcaaacttttgtagattttcagagcagattttttattcgaatatgtaataatggaacttggactgattggaaacaaatacaaacaacatagtattaaaaataagtcatattttaatgagataaaacggatgggtgccggtccacacccgtccgctcctcatgttaccaaagaattatagtatttctatatcttcagcatcatccagattctcatcaactatattcatggataaagacaggtcaaccccagtagtatccaaaaacaaagcacttacacgaaatgaagctgtgtttgtcttactccgaacgaagagatgatcattttttcgtttgaactctatttcagaaatcatactaccgttgactttccttatgatataggagttaccagtcttactattaataaagaacagacctgtagaaccaccccaatatacatacaatatcataccgatataggcgttagatgaacccgttaggcgaacaacacatacttcttgaacggagtctttattgcaaaccaatataggagaaagaacgccttttctcaagagccctttacttcctaaattggcaatcggcattagttcttccagtactgaggcattggctttcaacgcctcacttaattccatcttttccataatattttttatttaccagtttcagtttccaaattgtttttcttataatcctgccatgagtcagcgagctgccccaccgaagcggaagtgtagaggtcaagtatatgaatctcgtcatcggcaagctccacaagctcgttccgatagatcttctccgcaagcacgtgcgccggaagaccgggcacgttcctgtaaatgccgtcagcaatatccttacggatatccgctatcaccatatcctgtctgtctatccccgtgaacaggggaaattttgtaaaatcaactttcataatatttttaattaaatactgttatccgcaataaaacataacccaataattgcccatacatttaacgaatccggacgcataatccagatcaatggaggacatctcttttcctccgggggcaggcaggatgcgtcctcccttaagtcgtaccccgccgttcatacgtttgaagtatatggtatgtcccggaacatccggaggaagtgtcacttctatattacccgtattaataaacatcacattgtcatcattgttattcagggaagtgctgtcggatatgttcctccagttccccactatgccatgaagagacacataactgtcattgttcggatgaaggaaaatgttacccccctccacgaacagaggaatgctcggagtcttgatgtgcattccgatcatgggattcggactctgtatgtcaattccggcatcatacgcaattccttcaatggtgacaaactgcgtgtttcccccgattttcacacgtgcaaatgtcctttcgttataaaactcaatttgtccggcagacagattgaaaccaacataagtatctgttgtatccttataaagagtttttgaggacaacatgccggaatctatggaaaacggaccgatacgtccgctatccgccgtgatttttccgctgatgtccacattgaccgctctgataccgtccgcatcaatcatggacgccttgatcttctcggtcagcaacagcttggtggcgataaaagtccagctctgtgctacttcccagtattttattttccccgaagccacattctgtttgggggtttccgtcgaaaccgacgtatgcgaacggatgcacaggtacagcaggttgtcataaagtacaatgtcgtaaaactgctgcccttgcttgccctccaggtaagacacagacgccccccatacacgcatacgcatgcgcgctcccttatctcccttgtcaccttttggagcaaaactgacctgtccggttctagtcaccaacggcatatcacctccttattccttggttgtgatggtccatgccacgttgcctcctgcctgctggcacatgtcccaagtacacgtgccggaagtggctgctgtaccggaagtagacgggttaaggactactcctgcactgtccatgaacacgaaatagaaagtcatgtccttgtacttggtggtacttccacgcttgaccagaatgggcttatagaccaccgtgtcaccactttcccggatggtctcgtcctcgggcgtgggattcaggatcaaatcaaacggatcggacgcatccattacggactgcgtgtcctgaccgatgagcttgccgccctggtacacctccactctgaacacacctgtcgtgtcaaccatatcgttggtgacggtcaatgtctgtgtggtctttccgctcagcacgctccacgcaccgttgacctggttgtaccacttgtacgccagtccggtagtgatctcgtcactgcccatgcgcgctacggctttcagaatgcagctctgccctttgtcccaaagggtaaaatacttgttgtcaccggcaatgatcgtcacatgcttttggtttccgacccccttggtgatggggatgctatagacgaactggacggtgtcgctggtattccctatcgtcacggtagcttcacccttgatggtacaagaggccgctccgctcgccttgaccagattcttgacgatctgcaatccgtagtaatccgtcgtaccgggctggtaagggataaacttgaaatgtcccgtctcaccgccaaacgtgttggtggagacattgcccgagaacttgatctcgacatcattgaaataccatttcatggaggaaggaaccaccagcccttccgccacccgcgaagaggtgagaatgaaggacaagacgggcttgagcgaagcgaaatccggtgcgatgttcgtcggcgcggacgcttcgcccatatactcctgatacagatctccctggttacactggatggcaggcatgtacacgccgcccttttgcgaaaatatgacctgtccggtcgcgctggccaaactcatgacgctcctccttccccggtcgtttccgtactatccgtgccttcggagctttcggtgttgtcctccccccaagaggcaggtgtgaatacttcgacgggatggtccgtaccgtctatctcttctttcgccgcctgcggggtcaggcagatgccgcccgcttccttggccctgtcaaataccgtgtcgccggggaaacgtgccacgtccgcctgccacaataatacattgccatccgctgtcctgttgcggatatcggtcagatgcaaccggtcggcaacctccttcgttactttaatgtaaaatgccataattctattgtttttaatgttatccaaattttcttactactaccgccttgcccccctgtgtgagcaccttgccgccttgtgtcagcgccacgtaagggcctctgtcctccacctccagctttaacatcatgccgttgctgaaaggtatcctgggagagtatccgtcggcaaccttggcatatccggcatctccgctcttcttgacgtaccagtgacagttaaacatggcggatggattcgggataacccccatggtatcccgaatgacgggtctgggaaagatggcgtaagtcccatccggaacacccgtaggtacgccctcccagtcggcttcaatcttcggaatcctgcggcgtatcaccgtagagactgccgggtccgatgtgcccggggttgatgccggagtcccggaagccgcataggtggccttgcagacaatcgtgatgtcatcacctatataattgcggtcaatcttatatacattcttgttcagtgatacaaactcccagtcgttgtcacctgctcctgtggttatcgcctccagcgctcccgtagacaacagacggtaccagaagaacttgcatttgcccgtagccgtcacgtccgtgtcgcctaccatcagtttagccgtgatggtctgtgcggtgatgtcacgcaccgggttccagtccagcgtggacgggctgtctatcgtcaatacggggatcgcatccgtaccgtcaaccgcgcggacaagacggctcatctgaaaagtaaacagctgtccggtacgtgtgtcggcatattctgcgtaaaactccagcgtgacgggttttaggacggtgacattttttttcattgtgatctgtcccttgctgtcaccggactccgtaatgctgtagcctgtgtttgtcgatgtgataagtgtgcgtgtggttccgatgcgctcgtaccacttcatgttggtcagcctggagttgaccgccccgattttagtcaccgcttccggatcggtggcgttgcaccgcggaaacaggaccagcggtgtcagcgtatagtccggagtgtattcagctttgtcagcctgatagacctgcatgtccggcacgctgcccaccacctcgatgttacaactggtttgtaacagccggtagttgatttctatttttcgttgctttgttgccattgtataaaaccattttaaaatgttacaaaattctccgccacttcaaactgctgcccgtcacgcaataacgcctgtgctttaaacgtacacacccgcatgttggtataattcggtccgagatcatctatcgtcagaggaagatttttcccggcgccggcacgcttcaccgcccatgcgttatcttctgatacattcccggtatcacgcgtccagctcacatcagcgtcaaatatatgatctgtcacgtcacggttgtacagcttgccggtaatatatagcgttgtggaaaaagtctcgatatcaaaataccacccctttgtgctgccgatctctatcgtaaattccgggttcccttccagcatcgcccatccggccgccgcatattgcggttcgtcggctgttcccgtcatcaggcacttccatttgcagccgtagtgccaaaccgtgtccgcccgctcctgcgtattggtgtaaggattgtcagaggacgcgacttcggccgaccaaaagccacggtccaccagttcctgtacgggcagtccctgccagtccacacggtaaagttcaccgaagatgccggcacgggcgaatatgtacgagtgcttatagttgacggggagattgtcaaacaaatccaaattgggcaaacgccccaatatcatgtaatagttgttctgttccaagacaggcttcgttactccttccagccagacaagacatttatccgtggtggcggacaaataccagtagctttgcctgtcctcattgaaggcgtttcctcttctggtaatgatcgtcaactctgtgggaggatagtttttaccgcccggcacctcactgtccgggtatgacaacaccgagatggagttggccgggacattcttggacagcacgcgcatccacgaggcgtaatactcccccgttgaaaagaggttgtttacaatcccgtacactatatcaccctcctggaatgcggtgaagtcattctcccagcgcttgcgcaatttcagggtataagttccgtcgctctctaaagccacggactcaatgactccgttctcggaatatgaggtgtcgccttcctgtgcgttcagacggttatagatgatttccttgaacactgcggagccgcgtacctcaagacgctcgaactgaccgcgcccgtcaggatagataccggcacctttaccggcaatcatggagtcgatgaacttgccgaacttcaataagaaatttgttccgtccgcttgatccttacgaaggaacattactaaggagcgcaatgcggaatacacgttactatccgtggccggtgtagagtcattccttcttatcacatacacaccgctgccaccatcgcccgtataggtctgtccctttagggtaaggctctcaaccttttcctccagctccccgatacgagaataggcggcggtttccccgacagtatatataggggaatcataagctaaatcaagattgaattcaaatccgataacccttgactgccttccgttctcgaaataagccttgttgataaggttgaccttttgaccgatgctgtagaggttgtgaatgccatcctcacggtatgcgtcatttgacatcatcgtgcagccataggtactcgggtctatcttggatttggcagcgtacttttcagtcttttccttcagctcctgctcggcggcacccacaagcccaagttcggttattttcgtgctgtcccagccggaaagcacatattcatctccatcctggggaaagagcacatcaccaggaagcggtctgccatagtcctcattcctgactatctcccaaagctgtgcctcagggttccatccgccatcctccaatatctccggctttccctcaggattgaacttcacggcaaactccaaaccgttgagaagtccggacgcgaaacgtatcctcagctcctgaccggggaggatatatttctcggaaaagttaacacccgtgtccctaaagcggtaggcattccatttttcctcggtggttgtgtcgtcctcattctccaccttgtccgtcacttcgatagtggtgacatccgacatgatgcccgttcttcggggatagacttcatcgaagataaccacctgctcgacggcttcctcggtagtcatatcaggataagcgtcaatgtaaggagtgccttcgggaagcatcagcctgcgctgcaccacgccgttcacaaccacggtctcatcaaccggacggtagtcagatgggatattctttgttgagccgaaagcgtagatacgggtggcataggtggactgggattctgactgtgacatttcctgcacgtttttcccgatctcgaaaatcaccgcatcgccggactcacaacgcccgaaatggatgatgttttcagtcacccaacattcgcaatcccatttcttcgccatctcaaaacaagcgtcaaggatgttgatgttatcgtaactcatcaactgggacttgttttcgactgtggaatcaatggagaaaacaaaatcctgtcctttgtatgtgtaaccaagagctttcaaatttctaaggactataccggcttgtacgtcaagcggggcggtcaggttccaggacgcttcctgtccggccgtctccggggtatatttgaagattttgtttttccatttccagtagtaggcgtcaagtcttaattcgtaatcgtagccggcggtattggtgttgaatgcgggcttctgcaagtcgcacacctcgaacaatccgaagttacattccacgtatgagccaagtttgaaatatatgggattctctaaggagaactttaacatgatgtagtcctccttcatcagagtgaacttacgcttgcagccttcattgatcaaagttgtaagcaggatagcaccggatatgtctttgatgtcgatttgttccataattaagttttgtgtgcctttacacaatgctgaacaaaagtatatattttatttgaaaatcaaatataatatcaaggggaatttctgttattgggattaggctcattcagcttcagcacgaattttcctatgccttgcatgaattggctgaactggttacaggaaatataaatagtcctgtaaactatattgggctgatactttgtctttatttcaagtattcctttatccaactcattacaaaagctgtcataccttgcaaagaatgtatctttatcaggggctgtcaggtttatctgtaatgtaagatcgcgctcgtcctttttgggatcagctgttatcacacgctttccatgctccattcggctcttgttctcaatgaactccttattgggtgctggggtcatgagggcggacagtgcagtgtcatccatgcttattccccatgtggtataagcgtcctttccattaataaacagttcttcttgtggcatatttatatactttttgtatttttcgctatttcgtcaagcttgtttccaaacttataaattagtttggtgtatttgttaatactttcaaggtgaccgttggatgaaatcatcagatttcttatctcagtcaacattgtattgttgtctttggcaaatgaggatatggcttgtgccaccgccagcgtattcagcatggcattttttatttcttctcctgcaatctgcaatgctgtaaacctaccgttcaactcttcgccagtatcttgactcattgcctgaaaacctttggatgaagctgactgggatgttgattcttgcgaaatcttgtcatatccggttgctgcggcaagctcgtcacggagcttcatggcttcgtccacataacccatgtattcatccatcagctccttacgctcattattgtcaagcgtaccatcatccttcatggcttcaccgaatttatcataccatgtcctcagtttgtcactaaactgttcaccgatggcatttgacagcatcgcctgcatgaaatatttggatatgtcatcagcaaaatcctccgcactcttctccatatccatcagactgcttataaaactgtcatacatggaatcgaatgacattccgatcaggccctcataaagactgtcggtcagttcttccagttttcctgcctgctctatataatcatccagcttgtcggtaacacgctcaccgtaacctcccttaccggaagattccatgatatcccataaccatacgtccgaccgtagagccttcatctgttcgggggtcagattccacaaggaatcggtgccggagaaatcctgcatgccggtagcttttcttgcgtgttccagcatttcatccgtccatttcagataatgctgccagctgccgtggctcttatgatatccggcttgctcctttgctatttgcagatagtttttattgacttcctcctgatactttacagcttccctgtaagattcaaccgatttcattcccttgcttgccttcatctcgtcagtcagatcctcgatggccgtttgcaaagttccattcctgtccgtcagcctgtctatcgtttcctgtacttccttggcgtttccacctattccaaacaaggagttgaagcctccgaatgagattgcgttcaggatgtttcctatgccgttcctcaatgacttgccgattgtgacaaacaaatcccctgacaagacatcaccgataattccactgacagcgttcagaacagcatcaagcagaccaccgacaagatcacttaatccgtctttgagtacgtcaatgatggacagaatccatccgacaatggggacctccttaagagattctgacgtttttcctatgacatccttgaatccgttcacggttttgataattccgctatatgcgttatacaatccaccggatgaaatctgctgcaagcctcccaataaattttccatgcttgctttcagtatggtggcagtatcagtcacattacgctgggcctgattggcgatatcagtctgtgtcttcacattggcggatgcaatgtcagcattctgccgtgctgtttcaagagcgtttgctgcggcttgtttctcactttccgttccgcccttctgcgctttggtgtaatcatcctgtgatttctttagtctttccaaagcagctgtttcaatccctatggcactgatacgattctgttctgctatttgataggcttttacatcctctccaagtttcttgaagttgactccacttgtaccacccaaagacttttccatctggctgatggcgtcaatcaatgatttctggcttgcctgatcggagttcttgaacttgtcagtccgtacatattttttcgcttcgtccaaggcgggctttatcatgtcggaaaacatggaaccaaactcaccgaacacagtaacccaatctatattggcttttatggcttctgtttccttgttctgtatggcaacatcacgttgtttctccagtaactttacttgtgcactattaacaccgttttcttcctgtgctttccttattttttccgcatactcttgggcgatagccaatttctgctgctggaacgtgccatattctttcaagtagtcgttcaaagcctgttgttcggctttcagctgtccttcagttacatcggaaatatctttatctctcatactttcggcattggtataagcttctgaaattttctgtgcctgcttgtcggtcagcttaccgttaccggctttgctccattcttcctcctgttttcttatcgcatcaatctgtttctgataatcaaggtcaatctgtttcaacttcttttccgtgccttctctcatcaggttgatttcatcctgttggttctgacggtgaagtgaaagaagttgcccgtccagcttttcctgattttctttttgcttttttgctagattttcctgtctggtcagtgcgcttccggttactccgcccagctccttgtatgtcttttcggatgcctccatcttatctttggcttctttcacctgtttcgatgtagccgtctgatctttgattaaggcctcgtacccttttttcgctttctcccattcgactttagcatttgccaaatcctcttgatatgtagtttcttgtgtttcctgtctgttctcaacttccaattgggtattgatttctgacaagacatcttttcttgcgtttgccaattcattcttcaggtcttcgatacgctgtgcctgaaccttcatttcggaacggttgttctctttccttgccagattataagcccattctgcactttttatttgttgttccaaagattcgactatagcctgttttgactgtgttctggattttgaaacctcttcattatatgccttccaaaacccagtcaagtcatgtatatgacctttctcatcgacatacttcttaaagagtacaggatatagtttctcaatgtcttttaaggctttaagtttagtggtctcggcttccacctcgctattaatggtgctaacaagaccttccaaagtacgtttccgatcttcttcgtccgtgtcgagtttttctattttcttgttgtacgagtccaaagcacgttcagcagatgttgtgctgtcggataatgcccacatggcagctccaagccctacaactgccgttgccaataacacatacggattagtaagcatgacagcgttcaacgctttttgtgctgttgtctgcaagaccagccatccgtagtgggcacgttccgctacagtcagggccgctatgccggaggtttgaagcgactgaatggctgttacgaccatgactgcaaccctgtatgaaccgtatgtagcaacaagtccggtcaataaccgacctaccttctcatagttctccaccagataagacatgccggacaaggtcttgttgatgacaccctcgttttgttttccgattttattgaacatggtgtcaattgcatcttcgatattgcttatttgtccggtaatggttttggattgtgcttccatcagaccgccgaatttgcagccttcattggtcatggattcaatggccttctgcacttcggggaatcctacttttcctgctgtcacaagttcgcttaccttgtctttggttactccgaattgtttggcaagttcatcggccaatggaattccacgtcccataaactgacgtaggtcctgtgtgaagagccttccttgtgtcatggtggtaccatacagccagaccagatcgttcaaagggatggatagtcctgccgcgatatccccaagccggacaagcgtatcattcacatctttagcctccgtaccataggctaacagttgtttcgcaccattggctacatcctgaaggttaaatggagtgatggcggcggtacgtaccagttgggacattagtgtgtccgcctgtcccttgtttccaagcattgtctggaatgccacttcaagctgctggaactcgccacgtacacgagctatgtcactgatgagctgctgcgctccaagactgattccgaaagtggctgcggccgtggtcagtcttccgaatatcttctcaatactcagcccgctttcttcaatttgtcttgatgtgttgcgtactccgttgcgtgcttcctctagcttgcgtaaaaagttggagttatccccagttatatcaaaatgcaatccagccatagtcttttcgatttgatgggtatcatgtgcattgacatgacatttgttctatttttcttgttataaaattatagaccccgtaatttttttgaccgattatgaaaatattgttctgtttttccgattcattcctcaagcagggctttgatacgttccctgttctttggattcccggcatcgattatttcttctgagccagatattccgagttgtttcatttcgtcagaggacagatatacagtcgtgatggcatcagccattaacatccttagattgatatagctgatgccccataccacataatcaaaagtccatccgtatctttggcaggcaaagtctatcattgttccgtaggtgctgttgcctccgaatgagatactgctattgtccttttttactttggctatccgttttctttccgtattttctttgtctattccgaaatgccgcaggaaggtatccatattatcacttgtaagaatgagaaccagtatggtagcaagttcctcctcagagagtgttcgggaaaacaattttgtacgcttatccaccttgctattgtcgaacaaatcgttcttccggttgaacgtggagtaggagagtatgcggcagacaatatcacgtttcgttttgcagatccttatggcttccatataaggattggtggaaacaacctgtttgcttatttcgagggaatcaaataatctggccaaaagatacattttgccgagtgtgacgggatggataaagaaagaccgcttgccaacggtaaagccggcaggtctttccatgatggcgtcggccacatccatctcaatatttcgctctttgtcattcataaatcataaatttgatgcaggtttatcctccaacctgtaaaggacgtctttccgtttgcctgttctctgaatggaaaattatcatccggcagaagtgtacaccgcgtttacttcaactgtttccccatctttaacagtagcggatgtctgtgtaggcagtgtttttccttcgatatctttatatatgattgtcacaagaccggcttttgtggtaattgaagtaccgctatgatgccagtccgtttctgtagataatttccacatgccggctccgccatcatctgtgatgatcactcgaaggctgccggcaccattaaaatttacgacttcgaattttacctgattgccggtcttaggtttcaatacgtcagcggtatatttccacttggtgccattatctgtgtcgtatgtatcctccaaggacaacacgcttctgtcgattatgataccttcaacagttttgtcttcaggctggagcttgacagcgtattcacctgtaatcacaccatctgtatcttccaccggttttctacggcctttgccagcccggatttcaaactcaaacgtataggtgtttgccgcatacttgacagcctcgttttctccaccttcaatcttggcctctttcttcgcaccttttgtaggtgtcaattttgtagagttctcgacaggtgtcggtatatcaatccaagatgaaggagcttctccgctgctttgcagctttccaattttgatagtacattttccccaagataattccatgatcttattcgttattgaatgaatataatagtttattgttaatgaagtgctcgttctttccgttcacttcaagcaccctttgtttattcagcgtgaagcggtagctttctccatgccctgtttccaatacttggatagcgactttgcaaagttctctacagcgtgcatcattcatttccgcctcgccattacggatattgtcctttacataaatgttcacattcacgaaagcttcctgtatctgtccgcttccattttcaaggattgatatgactatatcctccctgtcagagttggatggtctttttgatgccttgcaaagttttccgttcacgactttttccaaaagggaacctttgatgtgtttgtaaatatcatctttgatttcaatatcagacttcatcatgatgcaagttgctttttcagtttactcatcattcccggtagttcctttcttgcaaacagttcggcggatgcaagtacattcttattttccattgcttccacaaattcagcatagttcattccggctactacaacaagtgcgtagccattcgcgaattttttagacaattcctcaataagtgctttgcctttcctgactccctcattaccttgtcgtacttgtgtgaaatctgagtattcaagtatttttccgttgtggatgatggcatagccaatcgaactgcgcaagtttcctgaccggtcataccagcttatctcctgcggtctgttccttgcttcgatcacacacaattctccaaggtaggagagggcgcggacagttaacacttcaacacgttctttttccttattgataagggtgtctatccgacttgcaggtgtcgtcatttttatacccatagtttcgcatatagttgataacgatgaaaccctttgacctcacattctctaacgatatctcctgacaggaataacttcacacgatctccaacagtaaattcccggcattcagcatcaagacgtatcgtggctgaataggtacggactgctccgtcctcaaattgcttttgttcagcttttccggccggaacattccggcatgggatatcaccttcccatcggctttcaccctggtggtaatcgccgttcttgtcttcgtaaccgggagcggtaataagatattgcagcttatgtggtctatcatcaagtatcatgattattttcctatatagactatcggttcaccaatgtttttttctgtttcgcctattgaattatagatgccgttggctaacgtcagtatattatccttgtcagatagacttaaggaaacatctccttctgtaaagttgggcatctgaatcaggctcatgagacagtcggccacagcacctttgaacggtttgcttttaagaatgtcgatggtgcatatttcatttccgtccagacttctttcaagcaaacggttttcaaagaagccactacttaatttgtagtggacttcatctttcaatgcttgcaggaccgttttcatacattattcagatttgtgtgattctactgtggcttttaaagtggcttcatcttcatcgttcagttcgttgacacgggcgatgatcttttcatcggcagatttcgcagtcagcttgccaccagttatcttgttaagctcctgaacgaactccgtttttttgtaggtatctccccagatggtgactttcacatctgttgaatcttgggcctccttttctgcgtcaacagtttgtgcatcggtgatatcctgataataaatctggtctactccttcaatcacggtaagcgcaagcatctgtccagcggtagtttccaccaaagggttagcggttctgaaacggctgataagtttcatctcatcaactgtggtataaaccactccttccaccgggcttgtcttttctgctaatgtcccccagaccaaactgccgacattttcggtagtcagataaaccaagcggtttgcgttccacggtttgtaagccttgcgtacaccgtttttctcataaatgatcgaacggtcaatcttcaggaatctgacaccgttatattggtcggcgaaagcctcgtcaaacaatgatgaggtaggagtgggcagcgaggtatcactgtcgaaaatctgccctctgtatgtggcggcgagttctttggctccttgtgtctggcgcagttttttgtaggttgacagggcgatacagatgactgatatggaattgccgtctccgtcagctgcggcgagcacacgttctatgtcatccaaggttatctcgccgggagtggtcacaccaaatccgtttttcggcaggtaaccgaaattgacacgcagtgctgttccgacattggtcagatcctcaaccgctacaaccccctcgcataaggctgtcagaaaattcgcctcattggattcgtccagcccgatggagcagaacaaagggtcttccgtcagtttggatgctatttgtgtccattttgcaccctgggccttcatgatgttgatggtattgatgtcggattcttccattacacgggagataccctgtttgggcagtgtgccgctggcatgggccagtgaatcacgcttcttgatgggaagcggagagttcatggaaacggtgtccgctcttacgtatgtggtatcgacagatgcgctggtccatttctggtcagcggaatatactttacgtaacatggtcttatgcaagtaagtgcgtttttttgcaccattgcgctcgcctctctctttttccacgatattctgtaacttcgggaaaatacgcttggataaatctgcaaattgtgatgcaatcattttatttttcctcctttatttttaatcgtgcatgaaatataatgaaggcagtgcggtcttcaaggcagctttgatactgtcaatagggtagggcagggccttgtcgttgatctctccgtcatattggatggctcctcttgcatcacttgcaggtgtcgtgcgcacccatattccagcatattcgtaattctcaggaagtgaggaatacgcattatctgacacgggcatgggcttgtagtcatattcatcatttgtactgcggatgataatatgtccggcttttacatatttttcattgaagccttccatgttcagagagcggccaccgataattcttccgcctttgcgacggataaccactgaatccattccggtctcaaacgattcaagctcgtttgacaaatttactgttcctggcattgtcctttactttttttgatgcggttagaagttattgacaatactgtcaatttctgcatccgttaataattcaatttctttatcaggctttcctgttcctgccgcaggcggcgttcccaatgtggagaggccggcatcggcacgttcctggttgtaagcctttaaatcctcttcgacttcagatagaaactgttcgaactcctcgtcattctcaaagttcattttagagaagctttttaatgtgcggttgccgaatgtgcctgtatctttcaagagactttcaagtttgcttttgcgcaaggagctggtcttctctccctccaatgcagcaaatcgggcatcctgttgttctctgtaagctttgaaccatgcaggctcttcgtccttgttttcctctttgtcttggggtttcttctttgaagctggtttcggagtatcattcggaaagttgtcattcggttcatcgtccggttccgcttcggggtggtttttcttccattcgtcaagcagacggttggcttgcgactggccgaaagtgaggtaggggagaaccgcttcgatcttttcgtcaatctctgcgtttacatcctcttcggaggcatcttcttgggattcaaggttatcggcaatcttggcggcgataccctttaattcctttgagttgaaccctaacgccttcgctttaagtttcaactttacaaaaacttgttgtcttctgtccattgtagaatgaattttaagttattagataaaatagtctgcacggtaaatgtatgccagcagactatttccgtagaacttaaaaacactcttagagcaatgagctttcatgtcctgttgtgctataatgaaacgggtcacaacgtggcgtacatctccatacgctattcatatgcaaatatactaatttatttgatattcaaataaattaatcgcttttttatgataattagtgtatctttttagtatgttcgctggttatatggcaggaaatgccaagctatcaccaaggttttttggacaccactgagtctttaacttagcggcagttaattaaattgtttgttatggattttatggggtgatgtataaacctaacgacatacgaacttcctaatgatataatgagtaataccagatatattaaaatgggataatggaaactatatatgaagtcgtgaaataaatagtatgcaaaaaaagtgtgaaccagccacaagttggtggaatgtcttccccaaaaccgcaacatccaagatatatgtttgttatgtttcatacaaacataacatattaagaaaggtatcacaaaaaatggatttagcatactgggacctaacatcattctaagtatgcaaagagttgacagaccacagatcaatagaaaattcctctttggagaagaatatcgggaaaaataagattggaaatattcaaatatgttgtaacgggcgaataaggctccgcaaatgaatgtgaataaaagagtaatataccatgcaacaacctgtagtggttgactggtacggaatatagattttccgatagtatttgtaataatgtataatatgcacagcaccgtgacggttgtaagagttgttttgagatccagcttatccaaaatgttgaatatatgtttggaactaataacaagcaagacataaggaagaaaaaaccaccattctctattgtagctgcaatccaatgcaataaaattacaaataaattccgtcaagtttcctggataattttggggtcttatgaagcaggccaatggaatgaatagtaaaaatacgatccagtagtttatataaagattgaagatgcggttccatgacctcatgattctttgattttgtttataagtgatggcaagtccgtatccgctgagaaatatgtatattggaacacagaaggctgccacccggctcaatgctaatacaagcggcttcccattccaaaaataaatataagtctggcattgttctacattggctgtcgtattgaaaagatggagaaataacatcatcagaatggcgattccttttagctgtaacgtttcttctttggtcataacctgttaatgaattaaaagagttgaaaatatgtttgacagattatgtatactgttgacatttaattaattaaagcttattaagctattaatataaaatgatgatacataattaatatacaatattcgtaaaaaacttcgagatttgcaaacaaatagcaggtgatttggctgatgagattgggaaaatagtccgtcaagatgttgtgccaaagttttctaattcggaaactgctgcatcgaatattatttttgaagtgaacatgattggttttaaatcttccttgaacaggcggaaaaagaccgtgaatattggaagaaatcaggtaataaggctatcatgaaaaagataaccgatttgctgaaagatatcgcggagtacccatatacaggaatcggcaagccggagccattaaaatatgaattagccggatattggtcgcggcggattaattctgaacatcgtatcatctattcggtgcatgatgatatagtaacaaatatactgaatttttatgagatatcgttataacaagtgaaaaaacgtaatacgaagcgaagtaaaaaaaacgcctccaatattaatattaattagaagcgttgatttaaatgttaagccttaaaagcccttaattccgcaacactattacaaatataactttttaagtacctgagcaacaaaaagttgctcaggaatttgccatgtcagatttttcacctatcttagtgttgcaaatcaaaatatgtatcaaacccgacagacatggcaaaggtagcaattaaatccgagaaactcactccttttggaggaatattttcaataatggagcaatttgactccagactctcatctgtaatcgactcaaccctcggtatgagatgcaggctgtatggttatcaatacagcgaaatcatccgttcgcttatgagcgtttatttttgtggcggctcatgcatcgaggatgtcaccactcatctgatgtaccacctttcgcttcatccgacacttcgcacatgcagtgccgacacgattcttagagccataaaggaactgacccaggataacatttcctacacatccgacactggcaagacctacgacttcaacacggcagacaagctgaatacactgctcctcaattgcctattgtccacagggcagctgaaagagggcgaggggtatgacgttgacttcgaccaccagttcatagaggctgagaagtttgatgcgaagcctacatacaagaagttccttggttatcgccctggcgtggcggttattggcaacttgattgtcggcattgagaacagcgacggcaacacaaatgtccgtttccaccagaaggacacgctgaagaggttctttgaaaggtttgaacaaaacaagcttattatcaaccgtttcagagctgattgcggctcgtgttctgaagagatagtggaagagattgctaaacactgcaagaccttctatatccgtgctaaccgatgcagttcgctctacaatgacatctttgccctcagaggttggaagaaagtggaattgggcggcattgagtttgagctggcctccattctcatcgagaaatggaaagggaaggcataccgtcttgtgattcaaagacagaagcggatagacggcgaactcgacctgtgggaaggagaatacacctaccgctgcatccttacaaatgactacgagtcttccgagaaagagattgtcgaattctataacctccgtggagggaaggaacgcatcttcgatgatatgaataacggattcggctggaacaggcttccaaaatcctttatgggagaaaacacggtgtttcttctgcttatggcactcatacgcaacttctataaattcatcatggcgaggcttgacgtgaagaggttcggactcaaagcaacaagccgcatcaagacgtttgtctttaagttcatctctgtgccagccaaatgggtcaggacatcaaggaagtatgtgctgaatatctattcatgcaacaatgcttatgccaatgtgttccagaatgactttggataacaccgacaacttatagtcgtgattttgcgtattgcctcaagtcgcatggtggggtaaggggcatttatatgtctttatggtgacattcgatgcactgtgccccctttttactaacgatgcagattcttttcgcttctgtatcatattaggcgcgtagttgcggatttgaggaaagctacatcgtgtccaagtcctttagggatattcaataaatgaccctaacccaaaatcctgaataagcgttttgcttcatcataagtaaaatgattgaaagattagaacaaaatttttgattaagagtttaacttcgtgatggttctttcgcatccaaaataatccagtacataaagaggaaatgcgcttaatactgcaacttcggggcatttatgacaaatgtgtttttctaattgttttgaaaagatagcttcctgcgatatcaaagaagtaggcatagtaaaagcatcattgacaagagcattagctttgcataaatgggcagtaatcagttcttgccaaactgtttttgtatatgaatttacatttgataattgtggtctgctatctgatgcagcgacacttttgtaatgaggttctttcaagcattcttccttgttatgacattcttctttatatggacaattcttacgtttgcattttactgtcaaagacttaaagctttctaaatccttgaaatgtcgtatggcttccaccattggataactgatgtaaagcattccttcttcagtttcgtcattgaagagagaaagcatttcttttattttattgtcatctgccaacgtagaatgagcatcatagtcaaaaaacaaatatatataggcaaaactgtctcgagtgtaattttctagaattttagcgttctctgctgtacgttcttttaataaggaaactatatctattgaaaactctttttcttcttttatggcacgatataattggtatatctcggcatcaaatacacattttatggaattcgttttgcccaagaaattatgctctaatttctctatgagtttactttctgttttaactccctcaaagataaaaagcgttttttccttattcatcataaaaagctcctgcgcgataaattttttcgatgttatgaccaaaacgcaattctttgtccgtacaatcagccaaacacttaattttgttattgtttagtataaaattgcagtctggacgtaataagtcattcgtcatcaaatatgtgttatgtgacgatgtgaaaatctgacaatccaatgcaaacaaccgcttgcacacctcaaaagctaagcgaaaatgatagaaagcatcaaactcatctataaagacaaacgaggcttcatccatacgtttcagccaaaaatacaataattgtaacgactgtgtacctgttgatgctactagtctaaatggaacttcatttttatctatttggcaaagaatctgcttatccgtaatattatgtgcaataaactggaaagtctgaccgcttactttatgtaaaaaatcggagaaatcatcaagtagattgtttgtgatgataaactcatccaacattattatatttgtttcaagtccaataaattcacggacatcaagattcctgaaccaaagcatggagttgacaaacctgttgagtttgatcagataatgttctgaattgagtggataagatgtaagcaggaagttgattacagacacattgttggcattgctctgaaagttcttttctatactttcgtccatagggaactgttgcttgtcaatacgaaataaattattcttccgttcaaaaatgttcatcctatttacaaaaaagctttcctctaccagtactccggcagcattcttggcatatatgtaatctattgtgtcattgtcaaatttgaatgtgtattcaaatttgacgactccatcattgttacctgcataaatgaaattcacatagtaatctattttcttccatttcggagataaatgattctctatatcgaatatagccaaactaaaattcgtcttgcctgatccatttggaccatatatgataccattctttatgacaccatctttaatcacagatctgttaaactcataattggcaggattggataaatcccactcaatacgattggcaaatcctctataatttgttactgcaaattttgttagcatattgattttaacttgattcaatagcaaagatacgtattattttgatagttccgtaatttttttacgataaaatcaaaggctaatcattgttttttctgaacgggttgaaatccgggtcttcatcttcatcaaccactccggtcaaatagagattggtgttagcttcatcctgccaacgctcaaagaccacgcggtcggcttcatcctgacgctcacgttcttcgggtgtcatagtgtcacgttgggaagcgatacgcttgtctacttccttttctcttaccctttcttcatctatttctttgataacttcatctatggaagagtagcaagcttttgcatagctgcattctgcaccatcatacttaaaagtaacgactttatcagtttcacttattatttcgtatttcttctgctttttcattgctctatcaaaataattctgtaaataccatcttcctctattctgcgttttttaaccaagaatttcgtccgcctatcgaacataatttcatgttggttttctaatgtaaagataccattaaattccgatattttactaatatttcgcccatttttactctgaatttcaaagataacccttttatggcttttaggtactccggcatgggaaacaaactttcttggagtatcttcatacaggctggaagacacaaaacctttatccgaaaccacgtcaccgatacggtccagaaaacgttcctgtagcttcttcatgctcatggtttcaccacgatatacaacaccttcatgtttggggagtttggcaagagcctgacttatcaatgtacttgccacatccacatactcatcgtcagtaccattgcgaagcctgcgattaatttcacggctggtggctcctttgttggtttctcctacagcctgtgtgtaggcatttacagcagcctgctgtacttccgggatatttggataagtccggttgtaatattccacacggctcatggcaagattagtcctacgtttccgcacaaatgctttctctgtcttgttatagacatttaccttgaaatcttcacggatatacttcccattatcccgaatgaaataaggggagttatcccagcttttagctcgatgaatattatcgtttatccagaccttgaaactattcggcacatctttcacttcgttcacactttcagtacttgcttcactacgtccgtcccattcccaaaattcttcttctgttttgaggataggaattttatagcatctgcaattagacccccaaaagcatttcccattgcgacggatatacatgatatggtttttctccagagtaaggtcatatacaaacccatcgtaatgttgaatctctttatggaacactgtcgccgtgacggaatagcattcacggattgaataacaatcgtagtttgaagttatgatacttccgttgcttttgtgcgacactccagccttgttcactgaaaaggacggacgattcccggatttcagaataagctcagacaaatcccctgccatacgttcagatacggtaaaatagaggatttcatccttgtctgacttaaactctgttccatgattacctacaaaagatttgcatggtcgcctgtatccatcacaaagcataaaggcattaagaaatattctgatctgtctgacagatgcattctttatcgcagacggtataaatttatgggaacacttgccgaatattttcagataattccttattggagtactataaaatgcaacttcttgcttgtctaaatgtggctcaaatccgatacgcttcacgcagtttacaattctgtcccgtgcaggctcaccttcttgttgggagataacaaccccggcgtttcccattgtactcccgcctgaaagccaataccccataaactcacaaaacaggtcaaatggtattctgatgtcgtctatctcataaaatgcaacatcttccgactcatattcgcatcctctataaaaagcccctttcccctttgtgtactctttagcttggcagttctttatcctgctatcattcttgcttaaataaaccatattatgttccggtgtaaccaaacagtccaatgatttattgaaaaagtgtatcatgtcaccattatatcggtaacactgcctatccgtaaactctacccactcaagtgttctgttagtaggattcaatgacaatatcaaatcatcatcaaatacatttttaaacagtttccaccctctgtttgtaagcacttcgctgtcatcggaataacaattcgggtgccaaccaacccaagtaaaatccttgggatattttccggcaagggattcgcatacagtgcaaggaaactctcttccggagcgtttgatttcataacctaccacaaagtccatttgcttccaacgctcattttcagcggtccggtaagccatattgatttcagaccgagccaaccggatagaacggtattcacaatcttttagatgttctgcacttccgtacttctctttgtagtctttttggagcgatggaaaatcaaggaggtgtttggatatttgcttgcttagggcaacggcacttgttcctttctgaatagcacaggagatggcggcttccagttcctccttgtaaacggtggactgttgccagagtttagccgatacatcaaaccctctgtccctgcggttctgaaatgctttcaaagcatcagaattggtttgatagagaactttgtacttttctttatcaatagtggcggtataggctttcagaaccttgtcagccatcaaatcttgtacctcattgctattcttccactcatcagaagtaccacgatagataacagaacgaatatcatctacgaactgagcttgaatgtccgcaatagacttcttggtttgcggatagtcagaaaacttgaagacagtaccactgtcggcatcatattcagtattcaatgcaatctttgcggcttccagattaagagtatcgtatatctgctcaacaagggcaacatatctgtttagccggctgttgagttcctgatatttcttcttctgatttggaatgtttggttttgccatactattctgtttttaagctattttttggagtgggtagaaaaaacatggggggtaagacaaaaaagattgttctgtttttaagattagctcacttttttcttgaacttgtcacatacgtcacggttaagaaagcggctggaagtgaaaaatggacaacggcacatgaagaactcacctctcaagttcttctcatgtcggtcatacgaatgcacacaatccttgcaatggtatgaggatatgttagagggtatcatcttttttgacatggcgttattcttcaattctatcaggtgccggcatttccagcagcctgatagccttaatcgtttttctaccttccaagatagctttgcataatctatggtatccgtctgctatttgtcctacttcatccaatattatagggtggtttaaagaacaatcacgaacacgtttgcattgaaagatgaagctatgaagctgactgcactcaaatggttcaacagtcaggtctatattccacaatggcatatcacgtacagggtattcctttgctttcgcgaaattataaagtgtttgagcattccatatcttattgcctctgtggtattcactttcagcgaaagtcatattatctattggtactttcatgttatttacttatttagcaaggtgcgccaacgttacagacatccaacgcacccgttacattttctacacgtggcagataggctattgaacaatctcccaatcatcggcaaacacatcgctaatagacggaacccatgaatcagcacgcccggtgttctcgttgtaaataaggcattgactcgtatagtcaatgaaacctttgcctttcagaataaggtcttttgctgattgcggaagagattgcatcttgggaataacatcactctctatatgagctggaacctgtttgaataccattaatcctttcccgttccagccctttctacggataacgccaccttgtttcaaaacgtctatagcatcaccgaaacagataggagtttcttccttgacttctcgatatgattcttcaaacagttttttgggtgaccaactttcatagccatattcagtacgagtgtgatatcccagtttataagactcattcttttctatttcactttttactaagcctttactgcaagcttcacccaatgtcataggttctgcctcaatctgttttgttccaatatacttttttgtatatctgtagtaatttaattattctccaggagtatatgtaccggtaatagaggcagtgctgtcatcggtcagagtcgctgtgccggtaatgactgtacctttgatagtcaaagctattgatttgatttttgcaccggtatcgcctttgtctcctttcgctccagcagcaccttgttctcctttctgccctttgaggttcttaaaagcaaaattcagcttgccttctttcattgttacatccacagaaggtgtacctacattcgcatcaacgctggcggttgccccggttacggatgagccattaccactcgcttgaggtaatacaatcattttagcggcagtaacagcggtagtactgacaatgcgaatcatcatcccggcaggtacacaaaggtcgattacccgctgatagggatcgtgaagtggaatcgcatcataggcacttggttccatttcaggcatgtgccggtagatttttagcggttcaacatttccgttgtctatttgaattacacaattgccttcagaggcgaaatctgcgacaaatacgccttcttgttctttaaacctcaaatccgcaactacgcgcctaatatgatacagaagcgaaaagaatctgcatcgttagtaaaaagggggcacagtgcatcgaatgtcaccataaagacatataaatgccccttaccccaccatgcgacttgaggcaatacgcaaaatcacgactataagttgtcggtgttatccaaagtcattctggaacacattggcataagcattgttgcatgaatagatattcagcacatacttccttgatgtcctgacccatttggctggcacagagatgaacttaaagacaaacgtcttgatgcggcttgttgctttgagtccgaacctcttcacgtcaagcctcgccatgatgaatttatagaagttgcgtatgagtgccataagcagaagaaacaccgtgttttctcccataaaggattttggaagcctgttccagccgaatccgttattcatatcatcgaagatgcgttccttccctccacggaggttatagaattcgacaatctctttctcggaagactcgtagtcatttgtaaggatgcagcggtaggtgtattctccttcccacaggtcgagttcgccgtctatccgcttctgtctttgaatcacaagacggtatgccttccctttccatttctcgatgagaatggaggccagctcaaactcaatgccgcccaattccactttcttccaacctctgagggcaaagatgtcattgtagagcgaactgcatcggttagcacggatatagaaggtcttgcagtgtttagcaatctcttccactatctcttcagaacacgagccgcaatcagctctgaaacggttgataataagcttgttttgttcaaacctttcaaagaacctcttcagcgtgtccttctggtggaaacggacatttgtgttgccgtcgctgttctcaatgccgacaatcaagttgccaataaccgccacgccagggcgataaccaaggaacttcttgtatgtaggcttcgcatcaaacttctcagcctctatgaactggtggtcgaagtcaacgtcatacccctcgccctctttcagctgccctgtggacaataggcaattgaggagcagtgtattcagcttgtctgccgtgttgaagtcgtaggtcttgccagtgtcggatgtgtaggaaatgttatcctgggtcagttcctttatggctctaagaatcgtgtcggcactgcatgtgcgaagtgtcggatgaagcgaaaggtggtacatcagatgagtggtgacatcctcgatgcatgagccgccacaaaaataaacgctcataagcgaacggatgatttcgctgtattgataaccatacagcctgcatctcataccgagggttgagtcgattacagatgagagtctggagtcaaattgctccattattgaaaatattcctccaaaaggagtgagtttctcggatttaattgctacctttgccatgtctgtcgggtttgatacatattttgatttgcaacactaagataggtgaaaaatctgacatggcaaattcctgagcaactttttgttgctcaggtacttaaaaagttatatttgtaatagtgttgcggaattaaggttaaatacaatatttttcatatttcccatatttgttatttactattcggcaccttcaaacaagttgttcatccttgcctgtcggtccgctttgtcttctttttgaatctggtttaatgttcctttgggatcattggagtaacctgccatttcgatggattcaagctggctgaatatcgctttgcctccattccctttcatacatctgttaatcagcgcgtcctcatcattctgaataaacggagtaatgacatgctcaacttctatattgtcaatctcatcagcccatgaagtattcatcattttcagaaattctttgatgacattacactcccgttcaaagaactctatccaggcacctgactcatccccgattttcagatgggcgtcagacaatatcatttgtctggcatcaaaacctatgttaccaagacttttcatgttttcgaaagataggtctggcatctgggcctgcatgaagaaaagcttgagcaatgtatccacatgatatttcagggcttctatggcctgggtccatgaaacataagctatgtcaccgccattctttagacggaacaatctgcgggcctctcccttgtcctcgtcaccgacaagttcgcctgtcactttcagtaagggtgcggaattgtaggctatcacgtctgagttacgggagagcgtgtattcaatttcctcacggatatgctctagtccatgaaaaataggagcggggcggtatgcataagctccgggaatctttttgaggataatcctttcgggatctgtaacagcaatccagctggcttccccctgttgtttccacttgtaatgacggtcagcggtatatgtctcaaagaaagggacctccttatcctttatcttcttcttatattcgaaggacatggcgatcatgtctccccactcgtcaaacaagggatataatctaaccccgtccatcggcgagtatgtcttgcatttcagcttatacttgctgttgaatccgtatagtgtgttgggtctctctaccacataccagatggtgaaaatttcacaggatgcaaaataggcattgccacgtctgatgttttcagaatctatacgggcatatttatagattgcttcaatagctttggttatctgctgacgtttttcattttcttccgtattatggtagacacgtctgacgggaatagcgaaagcgaattccgtaatacgtttcacaagtagtttctccaggccaagatgaatacgcgaagccggctcgactcttccatcagattttattttgtctttacgagaaaatttatcagttacaattttatgtctggaaggatcgtaatctttcagcgacttgctccattccggcacatccactgatttttctttcaaatcactgataatgtcagaaacaggtcttgtactgtcaaggattgtggtaatttcgtccattgttatactgttgtgtggtgcagcttcgcaccgcttgttttttatttggataggaatttattcacgaaatgtacttgtcctttgccggttactttggtcgtggtcgtgacaagcatggtaccatccggcttgttgatggtggtttgcttcagctcaaaaagtcccaatttcatagatttctgcgtcggctgattgtagtagtcacccttttgacaaagataaccattctcgcgcatccagctaaacaaacggttctgaccgatattcaccccattttgttgtaatattttagccagttcagcaattaaacaagagcgatgtgaagttgagacagcatcagcaaaaaggactttaggagcatctttttggatcttccgctcagcctctataagacgctgttcttttcgtttcagtgtttcttgtgccacaataagcgcacgtgccatgatttcttctggagtgtcgtccattttggtagcgatgtagccacctgtcttacggatacatggcaacacttcgcttgttacccatttgcggaactttttagcttcaggcttacgactatccaatattgtatcatacaaaccatcctcatcaacaaaatttgcctgttggattccaccggctgtttcaaggggatactttgaaagtacatccttatctaatctttgcgctaccttactgggaatcaaatccaaaatctggcatacatctgctaagcaaaagaaaggttcgttattctcactcattgcaattcttacctttccgaattgctcattctcaaaaattttaattgtgttcataatgtagttccgtactccttcatacggtggttagttacacataatactgctccaaaaagaaaccggataatacaatacgcactacccggtaacgtgaaggagcacgttagcaccaaatgctatgtcgcaaatataatcattttatttgaaaaacaaataaaatgattatatttcagaggaatattgcaaaggatttcttgtgcacattctcctctcaaataatctacggtgatggcagcaatagattttgactgaatggtttttagttcatcatatctattaaaagtgacatcgttatttttaagaatctccaatgctttagtatatccttctttggcagaagcattaacaaacttgtttattttctttttctgcaatatcgcttctatcttattgatagtatcggcaatatgttcttcctgcggaatgggcaatttatgccctaagaatattgccatacggtttaaatcttgctgtttcataattcctgtatttcaatttatgcaacttacaacatatttcgtagaatatcttcatcactgacagccaagtaatcccacggaaagaatgtattggcgagggaatcgaaccagtcaggagaacgtttgatacgttttttaatctcctctttcttttctatgatgatactgccattactcataaatccccaatgtgtttccgttgcttcttccataagtttatcacagggtgggagagcggcaccaaacccatttttgggattaagccagtcacgtaccgcccaaaacagataagccctcatgttggcgaaggtgtattcgcctgttatatcatgcagcccacgtgcgctctcggagaacttacaagaatacacattttggtacccaagttcctgcaaccgagataacactcctgctccttcgccgatagtatcaataaatgctttcgcacccttcttgtcaagatatctggttatcattccggctacgtgcatgtggtctgctgttccagcagactggtgcgcttcaaactcactgacatagttgccatatcttagacacagcacactgtcatcacgtcccatgccggcaacatcgacaccaatcttgcagcttttctttggaacaaaatcatcttcttgcagtttcctccaattctcgttggcgatttcaatccattcgtaggggataagcacatcttccgccactttagggaacataccgagcactttcacacggaacaagtcattcggccgatatagaccgtcttcccatttgaagtccccttcaccttcgttgaagtcagcttgctggataggtgagcaccagttttccactttgtctttcacccattcataatcaacttgaccaggaataactattttcttgcttacaacattctcagcattaagggaacttaacctgaatttggcaaaacggtcagacttcatggcacgtgcagcatatcctgtggtcacgttagggttgaacactattagcaaacgggaatttccctgcaaattaccttcgatggcattgtagataacttctgatataccggaggcttccgtaacaacaaacaatgtgtttacggcatggaatccagaccatgcttccatattgtcatcagaactcttgaaccccgttagaaaccattcttcgtagttggttctgattcctgaagacaataaacgtccaggcaggaaaccagcattccggaatagcctggaaacttccggtatcataatatcttttacttggcgaccggacggagctgtcattgcaattttggtattctttaccaatcttccgttaacccagcgtggagtaagatacataaagcacatagcggcacaagcggcacagaaatccttgccacgggcagttccggaggctacagcggtcattcggttgtattgaaccgagtgaataatatcctgctgttctttatccaaacgcgctttcagcacatcggaacagaacttgcaccaatcgtctctccacgcctgtatatacaaggctgccttatcgctcagatccattattcttctattttgtccggcaattcttttatcaaactttcgaatggattgacattgacatcctgctcgacacgctcaacataaccacgtttcttaccctttgttttcagataaaagattatcgcagttaaatcatcattattgattgcggaaagcaatttagattcgactacatcaatggtttcttcttctacttcctcagcacgttccttgaacttaaggtcactgtcccgccatttgtaataacaggctctcgttatacctactttctggcaggcatacgaaacaattccatgactttcacggaaatgtttcaaaaacaattcttgtctttccttctttcccataattttataactttacatgccgatacgtcttcggcttttcaccaaagacgcatcggatatacactagttatcaattaaaacattcaatcaaacaaggactgctgtacgcatccgccctcaatctctttcatttttttctcatccggcctcggagttatatgatccttgtcatagaatccgttcttctccagatagaaaaatctgtcccaaccacattggtcgtattcaccttctttgtaaggggttaatgcggattgttcggcaatgataaattcttttttggtctttcctctttgcttccctttatgggtatggcagtcaaatacataatcaggtattgacatgtatctgttgtcatagtctttcaaacatgtgacaggataagggaaatcatttgcatagaaaccgcaatatccgtattttacaactttcagaagtacggtaacagcctttgctacgaaaatggatgatttaggtgaactaccgggttgcatatcgtctgctttcttcaatgcgacaatttcagtggtaatagcctgatagttgagattacctgctatcataataagccgtttccaaaggaactcccgataccttaccattaactcattggccagataaccggctctgatatcgtctttgccgattatggcacgttccaataatccggcaactaaaaacatgtcatgcccatttttggtgtaacatccggcattacttccgacatattcatcctttggcaattctatcctgtctcttgaattaagcaggttacaggcgaaataatcagcatcacgattctttcttgtggcaagaagaatgccgagagccttttcaatgaatagaggtgatttgtcctgccagctttgtgcgtcatcagcctgtttgagtgctacaatcttattcgtaacaaggtcataacaatcctctgctgaaacacagagtaatcgcttccacagatattttctaaatcgtggtgccaactcgttagcagcatagcaggcatagtctttgttgctcctgcgtattgccttctgaatgagggatgaaacctcaaacatattgtgaccgttttttgtgtatagtgcatttgccatatctcaatctattatgcgatttcaaattttgaatttggattcaatttaatcaatcttgctatcatttcctctgccgttttttcagttccacaaaactgatgaaatgtagggcgagcagatttcgttccatctttctttattttgtaaataaatgcaccttttggcaaaccttttgaattaatgtactttgttgctttcattgtctatctcttattttaaattattactttgcttttcttttataatgctaagatactgatttatagtgagatattaaaatttaaatatctgattaacaatgagttaaacaatgattaacggcttatatatcatcaatgcaaatacattttggtttatgtgttataaagtcattggcaacattacaaccataagctccaacattagaaataagaatcttatcaccaatattagttggaccggaataatcacgatggataatatcattctcaatacaggtacatccgtaaatggtagcgtgttcgacgtaatcgctatcgtttgaaagcacattgcaaggtggatttttcgtatggcagacaaaaccgacatcatcacgcttgcaatccacaacgagcattgtttttcctctgataactttcttgccgataatggttgcaagtagagacatggaagtggaaactatcggtgtgccattctcggtgataagctgcacttctccatcagggaactctcttgcaaagacttcaccaatagttttggcatactcctcatacaatggtatatattctccatattgagcttttaaactgtcatccatgcgaccgaacatgttgccgccaatatcaactatattggctctaagttcttttgcatatcgagccatcatttcggcacgcttcttgaaatacgacagtccacgagcataagaaatatgacaatgaacacatttgacttttatcaatcctcttcgttgtagttctatgatttcttgataacttttgctatcaacatcaattccaaatcttgaaactatgccattcccaatatcaaaatttagacgcactccaattgcaagcggtgaggtgtatattccgataagtgaaccaagctcacctacattatcaacgttcactattccaccatgattagcacatcgtatcttattgcccaaatcagggataactccattgtatataatccggctgtcatcaaatccatagttccgtgcaagctgatactctttgggagaaacaacttctgcatatccaccaatttcttttaccacattgatgaattctttgcagtaattcgtcttgaaactgtacccgatattatagtttgggtagtattttctgaaagcggctacaaaatcggtgatattccgtttgaagtcatttttgtctgcaatgtatagaggtgttttcaaatcatcgcttgacattaatctttgctgtattttttctaaagtcaaattcataatactttccccatttatttttcattgcacatctatattcgtagttctttctggaatcaatggtggttcctccttcattggaagcttggataccgtagctgtgaaaatatttaggcaggagtacaactctgttcataagcagttcctgtaacatcatatcaacatcggatatcgccgggtctttcagatcatatctggccttgagtgctttcttgtttatccatcttacatgaccgggcattcccttaaaacaaaattccttgtcatacacatacaaagccatttgtggattatcaaaagcaagcccaagatttaaatcgtaaagtagctggccgatacggagtatttcatcacatgtgcgttctttccagtcagggtagttttctgctgtgatggcagtataattgtcaagtcgataacagaaacgctttatatcatcatcggcaacaaatatcacatcctccggtgtgttttcaattatccaatatagcgttgacatgaaactatgtaccttgccgccacattcaagcgtggcatccttaggaatgacaagcatatcatctatgccggcatttctataagcatcagcttcttcttccctaacgacataagtacagtattcaaggcaattcttagtcattattttatgaggtcgctgatatgacatgacgtatatgttaaacgtaataccgggtgtcatagaactttttcatctttaatccataatttagttcatatgtggatggaatttcataaccaagtaattgtttgcatcgcaaataaaccatattgcaacctgcatgacgtacaaacgggagagaggcattgatacgcgggtttatttcaagcagtaccaccttgccgctcttcttcagaatgaagtcaaaagccacattaccatcaagttcaagttctctcacaatcttgctgacaatatcatacgccatgtcgttggactggatttctccatacataatggagccgaaagccatcatgtagccgacataaccgcagatatgagtaactactcctttgtctgcaagcgcactaacggtgtaatccagtccttcgattctctgctgaaggataaccttatttttaccattgtcaacgatggatttcaaatcaagcaaggatatgtatctgttttctccgaacttgttgaatagagaggtatcattgcacttcttgtcatccacaacggcgaagcctttaccgccgcacagattgtccactttacaacagatagagctgtttttgtacttgaacatagaggcgaaagcatccacatcggaaacactctcaggaatgatctgtttgggcattaagccggcataacaactataaagagcaatcttattgttggcaaccagaagactgtcaatagaagaaacagatacaagaataccgttttgctcaaacttatctttagcgcgagccattatttccaactccaatgtcgctgtaggcatgatgattgaaacatcatattccttgcataaggatatgagtgtttcaacataatttggagcagaaatgggcggaaccacaaaattaccgtctgacagttcagcaggcgggaggttggccgcaacggaatttgcgacatatacttttatatcaactccgtcttcattgtttttcaaacaatctatcatttcttttacgtggatggagcagcacgtaagcagtacattgaaatttttcattgttctttttcttttttaggcataatctgggcttttatatcatcgtaccatacggcacgtgctttaatcttacgctctctggtggcgtttctggatacaagaactttcttgtcgtcaattccaagagcacgggtcagattcagatggtctatctcgttacgacatacaatcatcacataatcgtatttttcatagcgtatcagttccatatccttgatctttgtttctttgacattcagattttcaaggtcaaggcttaaatcgattttcaagtctgcggtccattcagccagcttgtccatatcccattcgccggcatgggtgttcgctttgatattaatagcctttaattctgattcactgtaaccaataaggcgtttgcacaaaacttgagtgtcaggattctccataagaatggaaacacgttggtgtccggatatgatattgttgtgttcgtcaatgacgataacgccgaaatcgccaaggttgtcaagtgactccttcagcttctccttggccttcttctttaatggtttacggggattcccaaactctgtcttaagttcggacacaggcagttctataatttctattcttttatccattgctctttttttataatgaatatatgtacgttagacctgacagaggaagtaccgatatcattaaatccgagtttcagggcattcttccatgcagcggtattacagggattgatatattggtaaaccccattcattttagcgatgcggaaagcatattcaaggataagccggttacattcatagcctatgcctttaccccaaaaggctttgttaaggatatgagtgtgaagttctccaaatccgtatgctgattcatctattctatctatgaaaacattgccgacatatatgccgtctgccagaacagcaaagcgtatacactcatcactttctgactgttctctataaaagttgttttctgattcaagggataggggagagtaggggctttcgcaaatagcgtacttccatatatccttatccttacgcatcctccagctatgttctgcgtcggatattctttgaggccttattgttacttccatattttccaggttatgtacaacttcatacattttctgcgtaaatgcctgccgggcatattcccgacaggcttaaacacaaactcaatcatttttcaagctactcgcaagagcactcatgcaatttttcggcttctttcagtcgtgtcagatggcaatttccatcaccccgtaaattacataagcctttttgtccttgttttcgcttgactactactaagggttgcgggaactcaaggattcgaaccttgttcttcggattttcagtccgacgcatagaccaactttgctaaattcccttgttagctaattgaaggaagcaagacttgaacttgcaatcggatgatattccacgctgtcagactgtttacgtccatcctttttcaccgctgacaggcggctacttaacaatcccatttctgtcattccttcaatttagctgttttctcttatttctgcctcaaaaatacaacattttatttgtctttcaaataaaactgaacaaaaatactatttttctactctcaaggtctcaaccttccaacatttcatcatatggtctgtatctattcctatattgaagcgtttacctatcctcaaatccgcaactacgcgcctaatatgatacagaagcgaaaagaatctgcatcgttagtaaaaagggggcacagtgcatcgaatgtcaccataaagacatataaatgccccttaccccaccatgcgacttgaggcaatacgcaaaatcacgactataagttgtcggtgttatccaaagtcattctggaacacattggcataagcattgttgcatgaatagatattcagcacatacttccttgatgtcctgacccatttggctggcacagagatgaacttaaagacaaacgtcttgatgcggcttgttgctttgagtccgaacctcttcacgtcaagcctcgccatgatgaatttatagaagttgcgtatgagtgccataagcagaagaaacaccgtgttttctcccataaaggattttggaagcctgttccagccgaatccgttattcatatcatcgaagatgcgttccttccctccacggaggttatagaattcgacaatctctttctcggaagactcgtagtcatttgtaaggatgcagcggtaggtgtattctccttcccacaggtcgagttcgccgtctatccgcttctgtctttgaatcacaagacggtatgccttccctttccatttctcgatgagaatggaggccagctcaaactcaatgccgcccaattccactttcttccaacctctgagggcaaagatgtcattgtagagcgaactgcatcggttagcacggatatagaaggtcttgcagtgtttagcaatctcttccactatctcttcagaacacgagccgcaatcagctctgaaacggttgataataagcttgttttgttcaaacctttcaaagaacctcttcagcgtgtccttctggtggaaacggacatttgtgttgccgtcgctgttctcaatgccgacaatcaagttgccaataaccgccacgccagggcgataaccaaggaacttcttgtatgtaggcttcgcatcaaacttctcagcctctatgaactggtggtcgaagtcaacgtcatacccctcgccctctttcagctgccctgtggacaataggcaattgaggagcagtgtattcagcttgtctgccgtgttgaagtcgtaggtcttgccagtgtcggatgtgtaggaaatgttatcctgggtcagttcctttatggctctaagaatcgtgtcggcactgcatgtgcgaagtgtcggatgaagcgaaaggtggtacatcagatgagtggtgacatcctcgatgcatgagccgccacaaaaataaacgctcataagcgaacggatgatttcgctgtattgataaccatacagcctgcatctcataccgagggttgagtcgattacagatgagagtctggagtcaaattgctccattattgaaaatattcctccaaaaggagtgagtttctcggatttaattgctacctttgccatgtctgtcgggtttgatacatattttgatttgcaacactaagataggtgaaaaatctgacatggcaaattcctgagcaactttttgttgctcaggtacttaaaaagttatatttgtaatagtgttgcggaattaaggcctatatagttttcgtgcgcttcttgttccgggaggttaatgggggtaacgaaccagtctttattgccatgctcgtctttcagatagacttttactatcgttttcataattcctcaaattttccaagttcacattctataatatcaacttcactttcattggtatataaaccattttctttggcagcatcaatagcagcattttcataaagaaatacaccgaaacacactctacttgattttgttttccaaatatcagtttgaaacaaaacgtatactttattcttcatctccccacaactttagtgcaagttcataattcttctgtgcctcatttacggctttcttggcataagtaagagtgtaggcgtgttctcgtgggtatttgccggacttcacaccttcatggaattctttagcttgttccagcttatgttcgtagaaatcgatactttcaggcattgaaagattgatcgtttcagcacgtttttcccaatacttggctactctttcatgttcggcagccttgtcgctgagctcagcacttttgcccatattgttccaggaatcttctatcatcttcctgtgccgcttttcactatgatgtccgactttgattggttcgcctaaggaaaggaaatctctatctttgttcgagcgattgaaatactcattacttttttgtgcagccaatgatgcccaatcatgcctgcgtttcgctctttgcttcgcccattcctgtacattaaatccgtcagcccgaacgatagagtaataatagaaaccatctttctcgaaaatcagattaaaaactatgctttcattctctttgccatacttggttgtaacctcaataacttctcctttttcgtgcttttcatcgcactttgccaaaaatacatttggacagaatttatgataagtattcatagctctatgatttatccgttatactttgcagatatctcttctgctttcaattttttggtaagctctccattcttgtagaagcgtacagcaacaactctcaccgtttctgacaagaaccgaccacaatcattggttaacttcacttttagcttgcttgccttggctaaactttttgtacgcttctttattgtgtttttgaatccgaaaacataatcttcggtatcaatctcaaatgaatatgtagtggaatacatcactctttgaaactcttttgttagttctgttactttgctcatttgctctcttctattattagtcgttattatttccaagaagttcttgtaaagcagacttatatccgtccaacgcttgttgtgtatatcccaatctgaattttttatctgctgaaagagagtcgttgttcaatcctttttcaatagcttcaatgtttgctttgtagtatctgataagttcttctgttttcattgctctttacttttacttgttattaataggtgttattttgatattgtaaagatacaaataaataattgatttacaatggtttatatcttttattttcatcataaaatactgaaagacaaagatttaacttttacttgcagaaacgaaaaaggcagaacggacttctccattctgccttaatgcaagcaaatgttctatgaatataaaattaacttcaaacaaatgtaggcgtaaactcgatacccaacgcacgcgcaatgcggaaaaaacttgataactggatatctacttcccctttttccacacgggcgatataactttgctccttaccaattttctgcgccaactgcttctgggtcaattttagctccttgcggcgttcacgaagtatatcaccataataccatgccatcgacttctcattgaacttctcacgagtatctgtaccatgttccccatatttctcattaagttgctggttggttgttctgagtcttgccaatttcttttcatctaactgtatcataatgctaaatcttttaaaattcgtattgctttggctatttgcttatcgtaatcctttgtagatttctttaaaaatccgttaagcaggattatttttgttgctaaaatgacattgctgttgtcaattgcaaataacacagttctgtactcattagagccgactgacacacgcatttcatataagtctgttccatccaaatgctttatatactttacaggcaaggcatacaccgtttgtacaagttcaaatgtatactcgaacttatcctttacccttgcatttagatcattgtagaactcttcaaattcctctgtcttgtatatggttcttatatcagtggttttagtttctattgattccatgatgcaaatataactaattagttataatgtaacaagctttacgccctattttacactgaactttttcattgctcaaatacttttctgtgattatttcaaccgatttgcttatcatggaatctgtgtcgattcctatctgttggtagaagttctcatttccggcaagactttcacttgcaatttgcagtgttctgcgttcttctttggtgaatccgatgcggaaggtgcggaagatggataacgcttctttcaggcacccggactcgaataaattgattgctttttctgttttcgttctcatatcctgatatttagatgtgaatgtataatatatttgatatcaaaatgttataaattaaattaccatcataaacaactaatagatccctaaaacagccttatacaattcaaaattcttgttttcaacatattcatcggaagcatagcgtttagctctggcataccacttatggaagcaatcagaacaataccagcgattaaggactgcgatgtagaatccatcttggcaattactggaaccacagctgtcgcaaattccgacacatccatattcactgagcgcgcatatcatttcgccacgagtggcttgtatgaccttgaatcctttcttgttttcatatacttttgccatactgatttacttcacaatcatttcaggatgaacggggaaatcccaatcgattattcttgaatccatagagtgcaaattaccaccaacgacaagaccaaaactttcttcaaccaattctttcgcttcatctttgctgcaagcattgacagttacttctccttctaagacaaactggacttttactttgtattctttattacttttcataatcttctaccggataaaattcacgaccttcaaaatcatctgctgtaagaactacttcttcgcagttaaccatttcctcaactttctcgaaagcggaatcataatcatccgcttccacctctaccactttagaaagggtttctattattttgattctgtacttcatattgcttatttttctatttgttccatcaagttcattgtctcttgtatgacagcttgtttatcccaattatatttatcatctccataatggaatgtatcaaatccgaatatccaccaatcattacctatttctgtgttgtcggtgataaactcagcattatccaatatgggatttctttttccgacataccttggattaattttccttttgcttccgatagattcttcaccgcttattgccggttctgaaaatgttataccgccatgaacgtctatatcattaatatccaaataagacattccatgatatttgttcatagaagggacagctacatatccattatgtgtgccatgctctaccatagtggacttaaaccattcgtttgatcttataaatgctactactttatttcccatattctattcattttagcaattcaggattatcaaacacatttccaaatacctcaatactatcacattccagatcaaactgaagcagagggacagtaaggtactggcactcttttaattcttggcttattgggtattccgctttatgcagacgcaagccaaagcaagcgaagccatccatgtaaaccacttctccataacaaatacaatcatgatcggggatagcgcatccatttgcgatgccttcatacttgtagattatggaaatgtaatcacgctcatagatttctttcccgtttttatcgaacaaaccagtgaatcgaccaatggtattatgatttacatcataatcagctatacacttgcatgtcggcatatcatttatttcgggcaatatggaatatctgttttcttctatcttaacaagattcccatacaaccattcattgccaaagatatttacacctctaaatttaatcatccccatttcttacctcctttctgtatcccggcgtgatagccgtcaagccatatcaaaagctcttttggcgtatgatagccgcttaaacggtggcatggtattccattttcaaatattcggttccaggtttggtttgtgtcatgcgccacaattgcataagcgtttctggtaaatgaggaacttgttaggtgcatattgtttaccttgcagtaatcctctaacgacttcaatgcttgtttctgcgtcattgcttacctccttccttcaattcattaataagagcatctcttgtcttcacttgtgcttccagtaagccatttgtcccgtctttctctacacgcctctaaggtaggcgcacaacaagcaaagagttcaccactttcagtacggtaatcgtactggtacattctcactctctttctgcctaacttcgttgtgtaggtagtgtaattctctttaccgggttggcatacgctgcaacctctttcgtcgttaattgagttcataatcatttatcaatacttacttagtaatttgtaaaacattcgccttttctctatgtatttaagaccgtttcgtctaagacctcgctttgattttgatacagtcatttggcaacctgcaacgccaacgtagatgcaatttaaatgatgccttttagcttgtttgaaagcccaccaaatcgcttcacggcaatatctatagctatcattttgaacaccctcgtatcctctactcaaaatgaagtggcctatttcatttgcttcttcttctgaatagcatattgtgaagatattattcatcctttctttgctttacttgttcaaccaaaaactttttaaaatcattcttgtactggctgtgaatgattttatactgatgggataggttaggcaattgtttataacctttgctatacaagaatttggctactaattcaatcttttcacggttactgaaacctctgtccttacatatgttagttatacagacattcgccttgttggtaggcttcttttcaactggtggcatgtattcatgtctgccataagcaagcgttcttggatagccaaccgcttcacctatatattcccctgtaataaaatcaaattcaccgttaattaaactatctgctatttcacccataataatctatatttaatgtttcacattcaatctttcttcacttgtataagccactacaagccctgtttcatcatgctgtatggtgatgtacttttcacccctctctatagtagagaagtcataaggggttaccatcttacctaacactttgcccagttgcttcatcagtggggcttcagggctgataactaaaactaaatctgctttcataatcaatttctaatttctatttgaacattatatccaaagcgtgcagcatatctacacagtctattgataataagtaacaagcattctgttttagatgattcaaaattaacttgtaccatttcgtcaccatttacataaaaagccattgttttcataatcgtgtatattgtggtagcccgaaggctaccggattaggacttaaaataatcaaaatatatattcacctgtttgtttgtcatagacacctattaaaccgtctttatactttttacggtaattttcataatgtcttgttatgattttaagagaattagaatctttcacaaatacaccgttaagctctaaataataccgtttcatattcttctatattgcgcagggctttcgccctgccgatttatgttaatgcgttttatcctcatgtaataactcgcagtaaactggtgttgtggcatctgtgtgcttattggctataagaacctcattactatcccagttaatatatacctgtgtagcaaatgcaccgaaaaactgaatttctttcgtgccaaacaataccaccgcgtcatcatttacatttgcaagtgctgcaattaattctttcttggtcatattcttttttgttgcgcagggctttcgccctgctggttattatgctatctttagctctttaagtctcatatctaccaatgatttcagcttgcgagtatcaaatagtggacttctatacccatctttgataagctgtatcatttctttataaccaaccttacatacaacctctgtcttcatgctgttatcataaatagcagaattgcaagcggttattgtgaatgccattgttttgtaacctttatccttcttcatgatagatgcaaacaaatacatatatacagcatttttcatgctattcaaggcatcttcttgactggcatttactttctaccacctaaaaagtcaccacattcaatttcttgaccttttttgataatagacaatgtactgatgtacattttaatatctgttactttcatatcttctatgttttaattgttagtaatattggtttcttttatatagctaagatactgattattagtgatgtgtgcaaatataatcatctgattaacagcaagttaaacttgatttaacttaaagttggatattgacatgttcatttcagtcgcgctttgtatgaataccgtccaatgatatgtgcaatgctttttcatatatcgacttatcacaattagaaaataatcgttaactttgttcatacttttaaaattataggtgcatgaaaaaaattgtgactttatttgcaaccgtgcttctgttatacggttgtggaagtgttcctttgacaggcaggaaacagatgctgcttgtatccgactccgaagtgctttcatcaagtctgacccagtattcggaatatatcaagtcggcaccgatatcaagtaacgcgacaaagaaagcgatggtgacacgtgtcggaaagaaaatagccgctgccacggaacaatacttggaaaataatggaatgtccggtgaggtgaggaacttctcatgggaattcaatctggttaaggataatcaggtgaacgctttctgtatgccgggaggcaaaatcgttgtgtatgagggactgatgaatctggtttcctctgatgacgaactggctgtagttatcggacatgaagtggcgcacgctgtggccaagcatagcaatgagcgtatgagtcagcagctggttgcacaatacggagcgaaaattttgggggaggctctcagtggaaaatccgccgccatacagaaagccgggaatatagtctatggtcttggggcacaatacggtgtgatgcttccattctcacgcaaacatgaaaccgaggctgactatatggggcttattcttatgacgatggctggttataatccgaatgtggccgtcacattctggcagaagatgtcggcgggcggatcgggttcagtgccagagatcatgagtacgcatccgagtgacgcaacacgtattagtgacataaggaaacatttgccggagatgaagaaatataagtaaactttagaaagttactgtaaagtatttgaaaaaactttagagaatggtacaaaaaggcgtgaaaccaaatggaatcacgcctaaattataataaaactcttaaaaaggtgtacataattaccaatccttaattctctaacatcaatcataataacgctgcaatcttacgcaccttattaattctctccataaacctgttgtctttttttgccatttgcaaattataagatgtttgcattttgagcaaaggttccgcatctaaatctaacgcggcttctaggagcatagcatattttgtatttagtgaacgctttgcattcagaatttcatttaatacagtataagacacacccatctctttagcaagtttcttttgagaaatacccctaaattcaatttcatcttttaatacttctcccgggtgtgtcggttcaaaaggaattaagttattagctatcattttagggtctacgccatctattttaatcataactttctatttataatggttagacaattcaattatattacagatggtagtcactacttcaccttgcacctctgtggttgtaaattcaatacgatattgattgtttactctaacagagcaaaagtcctttttgtcccctgataatttttcaaaactcagcccattgtatttacaaagtgaagttacatcagggacactgattattatatctatacaacgtttatatctacgtacgatatcaggttgaaaacgatgctttttatcattcgcctttccaaactcatacaattctttcagatactctttatcaaacgttactaccatctcatttgtttctttaatgcaaagatagcattttaattttattcattcgcatttttgcgaataattttcttaaaaaaaaattagcgacaactccaaagaatcaccactaactattctatttttctcatcacaaaattgtgaactaccgctaaagtaaagatttagggggctcaaatacgattttcaataagccaagaatgctggagccacgcaaatttggcataaagtctgattgggagctttcatagagctatatttcccattaagcgcatttctttttaagtatttcaacacattctttatcccatcatcgaaaccatgcttataccctttagcgtattctccaatgttatataccgccattgccaacacaaacaggatgatacctacaggcttataccaaccgggaagtgatatagaaaacggcttaaatgtaattgtgaaatctccaacccataatagggcgataatacatatgattgtaaatataattgttttcataatcaatatctttttccgttcaacttaggtcttagttcattgtatctcatcttctgctccacatgccatataaggtctatgttcatatgcttggcaagcccgaagattgataataacatatgacctatctgactttcaaaagaataattatattcataaaaataacgaattggcaatgtggatatggcgtatatgctttcagtaaatgtttcacctacgcaactttcggatgcaccatatatcgcttcttcaggaaaatcatcaatggatatatttcttaatccagccaaatcaagcaggcgtataaccgcatcgcttagttcgtctggaagtgtatcttttatatttttttcaaaggaacacttaaatcgcttttcttcttccactaatgcaggatagcgattatagtccatttcaaaacgtgatttacatttctttcctaatcttccctttctatccgcttccacagcttccataagctctccaacgataaggcaaaggcagtgttcgttactcaattctttatcatggaaaccgtgctcacaggcggtcttataagcacgattccgtagttcgttcaaattaatattgttcattttttatctgttattatattccggtgaagaggtgatgtccctttataaggtcaggcagtcatggctctataccaccgccaaacgcaaccgtatccccatctgccgcatcgctggaaagaactattacaacaagaagcatgttgacgagttcttcggtatggctgtcgatatggaaagtatcaccgactggctcctgactgaaaaagcggaagagcagttcgccatgcagcacccgccactgtacgttctctatccggtcccatccgtaacccagattcacaaccgacttacccctgaacagcttttgccatacatcatcggccattctgcgcttttcgtaaggcaatctgccccaaaagtgagtgataaagttccctaacattacaatttgtggctgcacggttgaattataattctgaatttcatcatgccgctttgtccactggtatgtgaaagaatcgcggtgctatctgcctggtgtaaaggataaagtcgcctgctccgggaaaaggataccggttattttcttataataggcatcggcatactgctgcatacccaggtcggtagcatgcactccgtccacctgactgtccatagacagtgccagctcgtcaaacgtaatgtaatgcagatttccggcttcatccttcatcgaatcgtatacggcacgcaactactcattggtcttacggaactcctttcctttcttatccgaagcgtaaaagcccatatagccatcgtgctctaccagtagaatgggagctttgcttttgctgcgcaatatacggatgcctttttccagacgcggacggataagtcctacacggtcgttcgtcatattcggcatacagtctatcacatacattgccgcatccacttcggccagcaatttgaagaaaccttcgtccaattgtccgttgcccgaaaagcccagattaacgaccggcatatccagcttgcgctgcaggatattggtccaggccataccgggacgcgaagcacatgccccttgcgcaatggaagttccgtatatcacgacaggcttttcgaccgacggacgcacgaaatcgaagcggctgcctttgggcacaccaatctgtaaagacttcacaccgttgtacagaggcagatacaaggtgaattcgtttcccttatcgtgcgtgttgcggtatgtcaggtcgttatacgtatagcgcactgtatcaccgaactgatagttggccgcgcaccagtattgctgcccgttgcagtccatcgtgtaaaggtctactccgctgacacctgttgccggcatgtggggcatcgagaatccccccgtaacctgatactttacttgaatttgtggagcattggtgtaaaacttcacatagagtcctgctgtctgcaacgacaggtcccacacgggtttacggaccagttgttcggcccgctgcggcaaacgctggtaggcctttccggtttccgcattccaggctcttccctgaatgggcaacagcgaatcggccgccgggttatgccaggctgtctgtgcaagcagacaaagcgactgcccgaataataaagcagacaatcctgcaaacttgaaagtggttttcatacttatttttcttttagtgttatttcatcaactgtatcagatgtgaggctacacaagcataacctttgtctgtgaagtgaatataatcgccgctgtaaagtccgtcacgaatcgttccatcttcgtcaagaaaccagcctgtaggatttgtgtaactgacctgagctccgaaggtatgcgcgcccagcagtttatgaatgcggttgcactgttcacggactgcactgccctgctcctttccggaagggaaaagtcccaacaggataatctttgaatcagggaactgcctgcaggcctcttccgtaacggcgatgataccttcagccgtatcgtctgctgtgtcctgaccgactaccagattattgattccgatggcaatcaccacatattccggagtacaccggttatagtttccgtaacggacacgccaaagcaagttctgcgtacggtcacccgagataccggcactttcccagtttccctgtcccaaagcgtcgtccatggcctgcttgcccggtttgtagctgacgagcttacgcatgccgccccaaccttgcgtaatggaattgcccagcaacagcagtttcagtttacgttcgttcagcgtggtttcgatatcctgtgccaccgaatgccactccgagccttccacccatccggcagccgagcgatactcgtttccgggaacggcatgggtacaattgttggaccaccggccggtagctttcagtatgaaacgtacaatggattcgggattgttcagtgaatgcggatgatggccgatacccggtttgtgaatcacggtaatcggggcaccgagacgtttcatttctgcttcgaaaagggctgtattctctgacaccggaacaatatcgtctgcatcgcccactacgtgcagtaccggaatgtctgcctgtgcaatcttggccgcatgattcagcggattctttttccagcgcaaagcctgttcctcattcttaaagccgtaggcttccagcatccgtgtcacatcctcgaccgaacctgcataagcaccttttcccatcggccaactcttgatgtccatgaccggtgcatcggcatagatgcaagccactttatcagagttctgtgcagcccagttgtaaacaatcagtccgccacggctcatgccctccagtacggtctttttatgaaaaccattcttcaccagatatttgtaaaacttgttccaacgttttactgccttatcggcaccatacaagtcggctacatcgcaatataccacatggaaaccttgctccagcaagtcgatgtcggtctgtggctcatgtccccagaaacgagcccgccatatccagggtcttccctgtgcttctttagccggacgtaccactttgtaaggaaccccatccaactggaaatcgtatccctgataaccgtgaaaattaaaggaggtcgcattttcgggtacaatggctgccggcttactttgaactgcattcagcaggtaatcgccgattttacgcgccatcgcacccgcaccgatagaagacggatgcaaacggtccggcataatgacctgatcccactggttgccaaacagattatgcagattaataatacccagtccgttatcgtaagccagctgttcgactaccaaacgtaccttttcttcgataatgcgcggactgatggtgttcttctcggtaaggaagcaacgcaccggagtgagcagaatcacctgcggatgcgaatccagcgagcggtaggtatcgataagcgtttgatattcttccataaaatgcttttcgtctttccagttctgcggcttggtgtcgttcgttcccaatttaatcaggacaatgtccggaagaaagtttttcgattcgccgtacaccccagtacggacatacggataatcgccgtccgactgcgccgttgctccgttcgaaccgaagttgcggacttcgtaatcatcgcccaagtaatactgcaactgggcgggataagagtttttctcccggttggaaatacctgcaccgtacgtgatactgttgcccacgcacgccaccttaatgattcgttttgcccataagcctgtaggcaaaatcaacagatagcaaatacatgccaaaaagattcttttcattgttatttagataaagttgcaattcacttttcaaacagaagtcccctgtttttcaacattgctatttggtcagcaatacttatgggctgcttagtgtatgttatcatatgtatataaaaataagttccgccctggtacgcattgtaaagaggcgtggcggaaattgttgatgcaaagataatgttttttctgctgtactgcaaacatttcgatttttctatcaaaacaaaaaattctatacttttgcaatgagccaaaaatagtagtgaaatatacaaagcaaattgtgctgaaaaagaagaaacagcttaagttggttttccaaaggagttaagaatcaataaaaacgttaaatcttcaccctttagaatgtacaattaaagacaacaaccatatttctgacttatcacctataaaatattgatcaataatcggttgtaaatactattgtaaaagatttgtgttgtactccatccttaagttctcaatatagcagtctgattcatctggatcggtaacgaatactatcttaccagtagtaagtatcatcttttagttcctttttttcttgtattaagccatacggtagatattcaaccaccgtatggcaatatttatttcttcattaaatcaatgcgctctttcaaggtaagaatgtagtcgtgcatctgtactttttgaacctccattaaggcgacctgattttcacctgctatttcaatagcgtcttttcgaccaaggaacagtactaacttattatgtttgtccatcaactcattatattcgatatacatacggtcaagaggggtatcagccacgtgataagccttttcaaagacatctttaggtgaccagctttcataaccgtcttcatacaccaccttataaccttcttctactggttccattgtttttggaatagcatcagtaggtagataaatttttccacccttgcgaattgctggtgtggcttgaactaattttgttccaatatactttttcatcattgtttctatgggttttacaaagccgcccaaggctcatttctgttccgatttgaatttatctatagtagtccttttattaaaaatagccataacaatcaaggctaaagctactttcagtaattgctttttcccaataattacaacattactacgatttagtccgtcattagtcatgatactgtaccaattcttataaggtggcagtaccttatagatagatattttataaattatcttctttattaccatagctaatcttctttttcttttgattcatcaattacaacacccctaatatctctttcaccaaataatttataagtaaacgttcctccataaaactttatggtatctcccttaacagtaataaccattccaccttttaatctatgttccatgtcatctttacaagataacatcgtggctgtcataagtataattaatataaacctcatattcaatctcctttctctttaattcgttccagcatatccctgttggcgtatagtatctctcatcgaaagacgggatgggcatccatgctacaacattataggtctgcaatccatacaagaaggaattagcatcttttgcgtagtctttttctgtcctatgagatatatatatttgtttcccgttataaactattactttttggtttaaagaaggcagtttatcttcaacgcttatccaaggtgattgctttgactgccattcggcaccagaaataaagtcaacaatgcagtacggttcacaatgacgctgcctgtttctgcaatcattggaatatccccttgccgcttcttctgctgtctgtttcatatctgttccgatttgaatttcttgtttatttctttttcagcagctctggcccctttcttgaaaccctctacaaagctgtcaaaacaggctctatggatttctaaagtgcatctttgcataagtgggcaaatcgagcaattttggctaagccctgcggacttcttggctattttcgttacgtttttcattggatttttaaattaattattacgatttctttccgctgcgacttcactcatacgcatcttgcaccaggaggtgagacatcggtattccttatccccacatctgacagtcctgttataaaaccggtggagcggaagggaacgtccgcaatgcggacaaacctttcttccggcttccgtaccggcaaccgtcttggctttacggtgtacaagcgtacatcccctgcattcatccagtctgcctttgtatttccggcatttgtgcagggagatgcgcccgcatggagcgaatttttcgcagtcgaatctgggttctgtgtgatagatgttcatacggcactgtccatcaaatcaaacaatgtgggtgcgctaacttccatctccgcctcatacagatatgaaagactgtctttccaatagtcataattcagttctgtagataatcccttacgtttcagtctgatggcacaataaggtactgtgccgatacctccgaaggggtcaaacaccaactcactcttgtttgaataccgttcaatcagtctttcaacgatatcgagctgtaaagggcagatgtggttctgccgtttcttctgtgactgcttggtattgagcgtgcgcatacgggtgacatcatcccatatccaatctttcttgcttacagggtcaacggccataaatgttttaggcagctttccgtatatttccaattcttcagcgaatgatacatgttcctcgtagttatatatatgttcacgttcgtagttcctgaacagatggcgtatcttatctattccggctcctttcatgtcctcatagctcaatagagagttaccagaagatttccaacttgcatgggcatctatctgccaacgggcaagcgagtattcactcttattctttgtcaccggcaaatcagcataggctcgtgaggtatcagaaggcaactttcggaagagaagaacatattccgggcaaccgatacccatctttgaaccgtccttgcacatctctgtatatccaagccgataagtctggttgttctccctcaccacatccgtatccactgtaatacgccccatgtagcggaacccgtgcttcagataatggaacacagtcatttcgctgaacgggtcgatggtgggcataccgtcacccgtagcgttgccgaacagtacacggtcctttacatggatgcaggctaaccggccgggctttaaaatacgcataagctccggggtgagatagtccatctgctcaaagaacttgccgttgtcttcattatgcccgaagtcgttgtaggtaggcgtatattcgtagtggttggagaacgggatactggttacaatcaggtctaccgaattatcttccatcttctgacattcaagtacattgtcattattgatagctttccacagtttgccggacttttcttccctgctggcaaacatccaccgcatcatcttttcctctgcctgcaaaccgaacaaaccgttcttgcggactatatcggtcatcttggctaccatctggcggtgttgcgcccacttctgcatgaatgatttgaatatttcaccttcgctttcggcatacaccaagtaaagctctacgggatgctgctgcatgaaacggtagatacgggctatcgcttggaacttgtcgttgaaacggtagtcaataaacatgattgccttgtggcagtggtactggaagttcaaaccctcaccaagcatttcaggtttggcggccagatatttcagacggccgtctttgaaatccgctatcaccctgtcggcttcatcatcatcttgcgagccatacacagccttacatccgggaattgccttgcagagtgcctcacgttcagcctccaagtcatgccataaaaggaaatggtcgtctttgttttccgggcgattgataatctctaccacacgggcaatcttttcctgcatgttgtcccgaagttccttagctgcatcagcaaggcctagagcagcctcacggaacattttcacctgcccgtcacggtcggctccggcagtggagttatccacactcacgacttcttcatgtacccgtaactctggtaactcatatcctgtatcgggataacctaaatcagacggtttggtgaggaacaacgcccatgtacttacccataaccagaattccttctccttgtggggatagagggtaagattgttcgccttcgtgctgtcacgctggaagaaccttgtaagtgcctgcccggtatccatcactccaaggtagccggcatagtgtatcagctccttgtatctgttgggtgacggtgtggcagtggcaacaaacctgtacggaacttctgcaaacataggaagaaaatcctgataggtcttggttccgaatccacgtaacacgctcgcttcatccaatgaggtaacggtaaagtaagaaggttctattcttactccgtcctcgccgtcacggacacgctcatagtttgtcaccatgatattggtcggacattgcttcacctcctgcatagtacgtacataggtcactttcatgcccagatgcttttcggcctgtgtcaggaactccactactacacgcttggggcaaactatcaaccctttgcctcctgtgcggttcaggattatccgcagtatctccaactgggttacggtcttctgcataccgaagctggagaatatcgccctgcaaccgccgcaaacagcccaacgtaccgtatctttcacatggggatataagtacggggtaagttcatcagccttaacttcaaatcctgtctgatggctgattgccatcttgtcttttaaaaattctatataatctttcattatgctattctttttttaatttctcttttctaaacaggtggctgaacgcattatccaaatccaagtccagattcagtttggacgggaaagatttaatgtattcgtacatcttataagcgaggttgtcatcatcaccgcatctgtcaatcagtgtgagcaacatggcgttcaccatgtcagaatcattgccgaagttttcctgagtggattcgctgcaatgattcacatcacttttcaatctctttatcgcggctatggctgtgttgaagtttctttttgaatcgtgtctgagttcaaagccttccttcttgtattgctgctgcatttctagaaggttggtttctaaaacgtccgtgaggacaaatacgatgttggtcagtgtattcaattgagttgtttcttgcataatagtaaattttatttgattttcaaataaaaaaataaagtcagattatccgcagaataggggagaagttgtaaaatgtgaacttccccaagatgtcatacggtgtattttttcaaagtgtccatgatattgtctatcggcagggatacggatgtttttcccttatcttcatagcaggcaatatgtctgtatgcctcagggaaattctctttgattcttttgaatgtccgtaatgtcagaagtgacgcaacgactgattcatataccttggtcttctcatcctttaccgcactgatctcgatttccagtttgtttatcttttcaataacttccctgtccgcctcaatgtgaggatagtaagcgtttgcgctgggaaatcctttcagtccggcaacacgtttttcataggaaccgttaaacagtgtgatgctatatgcaacagagaaataagaccgaaacttttgaaaacagtcggtgatttcctgtggaatggattttcggatcacctcttccgtaatcctgacctgttcatcatgcaacaggttgattttcttttctaacggctctaccattttattggcaacttcttccgccaaaactttcgtaatgttcattgctcttggtttttattaattcttttatgtatgtaaagataacttttatttatttctcaaataatataatcttaaaaacgcatctgcttaacttaatataactgtcatctcctgcggctgtttccgagcaggggaatgacattaaaactcttgaatctgtcaatcagacgtccttcaaaccgtttcctgaaatcaccgatgttcagattgctggtgatatggtatttcttcccgaactgctggtaaatctcataacgcgcatagagaaactcgtctatcacgctgtcaagactggtaccgtagctcttctgattctcggtttccaaacctatgtcgttcagacagatattgaacggggcgggattgaatccttttgactgcccctcgttgtaggaatacaggtctatgtgtccgttcatcttgtagtagttcatcatctgggtgacggagaggttttcaaactggctgggattccgtatcagacgcagataatcggcgaaaatctgcatgatcattgtttttccagtgccgggtgccccgacaatcagcaggttcttgtgaatcttgtaatcctcatcgggaaacactttctcggccagtctgcatccgttgaagtaatacagcaggaaagacaataccttcgagttgttctcgtcaacctcgaactccctgaattcacgtccagtataatcattgcccagctgcctgacaagatcacgatgggcgtaatattcggctggattcgtcaggtcatattcaaaatcttgcagaatagtctttttgtgacgctccaccagattgtatatctgttcctgtttcagtttcgccgcaaatgacttttcctgtcggatctgttgtagctctgctgaaagtttttgttcttgctctgtcatctttctgttttttaagttccgttatcaaccagtttgagaaatggcgttttgcatctgaaacagacttgtgtgtaacgccttccccctttagcttccaatagtacaggtcaacgtatttgtctttgcattcatccaaagtgaagttcctgaatccgttcctgtatgcccgttcccaagcatccctcagccatccttcctcagactttaggtccgcgaagcatttgtctaaatccatatcgaatgtttctgatgaaatatcgcccaggttttcacgcgtatgcgcgctagagagagagttattattatcatttacattatcattatcggcttttttgggttctgaaaaacccactgggttatttgggtttatttgggttgttccaatatcatccgaattatcattcttcgctctcttcggagcaccccctttgcttccattactacggtttctctcgacaatgccatggtatttgttttcatctatttcaaattgattcttgaagaactcaaatgctatttcaatgtcctcctctaccgtaataatctcgccaagttgatacttgaatatagctcggaataatcttccaagttgcttgtccgataacttcgatataggcttgtaaaacgatttatatatcaaaaaactttcttttcccatttcatttgttctttatgtagtcttacatgacattctcgacacaatgtaatgccattatctatatcgaatctcaattcgggatataaagaaaatggtttgatatggtgtgcatttaactccatgttacgttttttacaacggcaacatgtaaagttgtctctttccaagactgaatttcgccaatttctatggccgattgaattcctgcatctgtggttatcatcagtaattccacctttccagttccagtggttttctccgcttggaggttcatgtagcaaattctcatctatctgtttctttataaaagagaatgccattttagccaacggtttctgctccgacagtgtccccgatgcggcgtacttgataattgcatcgtacacttcaagtctgacctcctcaggatattccatcagcacttcctgccattctatatagaagacaaatgatttcctttttgtatcctttttcatcatgtctattgtttgataatcagtttgttatatatattgtaaagttaactttttgttatgggattacaataaatatatttctgaatatcaataatttaaacgttatttatcagtagcctttcctttgcagtgccatatcctgtttggcaaaggatatctgggtcctgatattgtctccggcatggacgagggtacggtttatacggtccagccatgtcacaatctgattggcggtcacactttgcgcggcgacaaatttcatggcgacagtcgcgggaacacgtgagatgaattccatgtggctggcatatacattcgctgtcacctgatcctgatatgccttggcgtcagcaagcagcttgccagagcgtgcgagatagacgtttatatcagtgaggcggtctataagctcctttggattgtcacttgcggttatctccaaaaaggactgcatttcttctatctcctttatgacaggaggcagggggcatccgttaatgaggcagttgccggtcccatcgtttttaggacaatatttacagtttatctccatacttgcaattcaatttatggtttatagtttttctgtttgtcatacgtcattcaaataatcaattgtcactttcataaactcatccaatgatttacagacgacgtatttcgctccgttggcttccgcatccttctgccattccttttgtgcaggagactggcggcctcccggctttttcatctcaatgcaaagtcctccatagaagcggttgctcttcagcagtatcaaatctgacactccgctggtcgcaccttcctccttcagtctcgctccggtgatggcatcacgtctgccaccattgggaacagcaaaaagcacgtttttaagtttcggatattttaaacggaaccagcggacacaagcggactgtatgcggtgctcgtcattcttcggcttcccgcgcattttgtacgactgcgcttttttaatcatctcctcgtatgtcatcgtctttttccttatgtggggttactaccgtgtccttgccggtcttgtcgacaacaacctgctttcctgctactgttatggttgtcctgcaaccatccggtagggactggataaaattgcgtactacaggagaatcagcaccttccgatatctgagtgttggatatcggaacttccttagcttcatacggatatacatccatgatggcggtttcggctacggatgcgatctgatagtctgccattgtacctttcattccttcgtccagtttctttacagcatcgcgaagatcggaagcctgtaccaatacggtagtggaggtctttttctccgctccgcttttttcgtccagcgtgatgaagaacagcttgcacttaaaccagcggtcggctgcatcttcttcagaggggaacagttcgctgtagttggcgcgtttgatgtccgaaacagtgaactcaccgctgatatacggagtgatttcttcaatgatacgggcttctgcttcagtaaagctcaacgcgtcaaccagatagggttcagttactttcttgttcatgccgttttccattaccttttcgtaacggattttgcattcaaaccaagtatgcatcataattaattcttttaaagtttgatattcaacgtttattcatttatagtgggaggtgcaggattcgaacctgcatgagtggtgtttttgcagttcactgatttcaagtcagctcccctaagatgtctcgtaggttgccggcttggatattaacggttatcctagaattttgcaccttacatcttgattagcgtctgccatttccgccaacctcccgtttgcctccctatcttcacagaccgggaaggcaaggtaacaaagttatttctgtattctgatcaaatcagggatagaaccgtaaatcggcgacttcccatcccatttgtcaatgaactgtttgtaaagaatttctttggtaagaccttttgactggataagagcctgttcggttttcaactgttccagctcgttgcgtttcttctgttcctcaatctgttggtccagtacggatatattggtgttcacttcattccggctgtcaatcttctcacggaccttttcggagaactccagttgtgcggagaatgtgagcagttgcagacctcttttttcaaactccatgtcaactatctgttccaaccgtttctcaaataccaacgaccctccgtcagccatcaggctatcggtcttatgctttcgactttcttcctttatcaaatcatatatacgtggttccaagatgttatcttccaacgaagacataaagtcacttccacggccaatatgcttgttgtcaaagacaacatcaatggcacggttcttgataactttatagctgtatgtaggacacgccttgaactccgtgttgtcggcagctttcagtgtgacagcttcagcgaattctccacgctgatcgaatagcggaacctgaaaaagttctgtgcccaattcccatgtggacactttgccggaaacaatcttgaaatcctcctttccctgcttgccgtaattctccataaggacacctgcataattaggggctactctctcacaggaaacaaacattactaaggtcatacataccatcgttaacttaatcagtcttttcatctttcaatgttttaatcagtttgtaaataaagaaaattattgtggctgatattattgttacgcccagccatgcgtgtaagtgattgaatactctattcccgacaacaattcctattatcagaaacaggattaaataaatatactctttcataccactctcagtcaaaattaaagttgtcctcaccgtccggctcttcgtccggaatgtcatacccaaagtccatcgggatgaaccaatctgaaatatagtcttgcatgatttaatcctccttttggctacttagccattctttataatctttctcgtaatattggggtattatacctttcctcataaagtctatgtattcttgtacagtacaatcatcccaatcaactccgttgtctggtatatcttccgtttctgatgtacaaagagtgtattcaaatggattatacccactgttgagcccatattcttcaactatcttgattacattttcatcggtggttatttgtttgatttcactttcagccacacacccggatatttcagagtgtttgccaagtacttcaccgaagtaaacactgattttgttattcactaagtattcgacatcttctgtgtctgcaataaatactccttcaagattgcccattcttccgcaatcgaagtccattttaaataatgctttcatttaatcctcatacttttttataattctactaatcaattctttttcccatccttgaataaatccattttcgtcaatattcataatgatgtagtcgccatatccttcatcttccgggcacatgatggatggaacgtaaccctcatgctcaacaatgatgttgccatctttatcagtaactgtataaatgccatcatcgcataccttatagtgaacttgtgcggtaaaacctttttcccaattagtgataactccattgtcgatgtcgataataggtcgccagcggtattcattatcggcatggataaattcagcacaaggaatagttggcggattttcagaatcactaactccgtttacttctgcgtcttcccaatagcgtacacctgcatccactttcaggtagaccgcttcaaactcggttgttttgctgattgtaattttcattgttctattttcttttgaattttctttatcatgtttctgaattgccttgccttatctgcttcgcaaggtttggtagaggttttgtctatcagatttgcactatattcaagcattctgacaatggaattcaaatctgtattgcatagggtatctgcaagttcaatcttgtcgaaatcaatattattatcattcatgaagtcaccaagagcgattatattttcacgagttgtggtaacagtaaaagctctcgtcagaagctccggttcctgagctttggtttgctcgacaaaggaaggtggttcattggtgaccagctgactggctcttgcaaatggattgactgaattctgtttggctcgttccgcttcctctttcatctgcgcttcttcagcagcctttttttcctgctctgccttgatgcgcgcttcttctgctgctttggcacgctcacgctgctccttcagacggttggcatactggatggtggatgcgatattgagcgtatccatataataagtacgaaggacatcgaaatcctcaccaaaccccttcagcgtggaaagttcgttctcgactttggagaatatggaatcaatttcgttgcatacagacttcatgcttgcggatttgttgagccactcagacttgaaaaccttattgaagtctacaaggttaacattcaatccatcaaagtaagtcttgatagtggctttctttctatccttgtattgctgttcgttttgcttgactaccgtgtcaatcttggcagagcactcgccgataagtttcacggtttcggttacaacgtccttgaactccctgaaaggtttcatgaattctttctcaatttcaagacgtttggcattgagggctttcgccgccttgtttaaagctgccttgtctttctttgcctgatcgatattctcatcgttataattggagatatcatacattggcaaagcggcttttaccatatctctgatttgctttgcgttggtagtaagactacctaacgtcttttcactgacgatcagttcaagatcgctttcctggattgctatctgtgtattcattgttccatatttttattagtcccatccaccattattgtacatagacaaatcggcagaatctaaattcgttttctgaatagcttctaaaagttttttcttggtttcccggcacatgttgtaaccatatcctttataccgatatgtacgctcccatgtgctaattgggaaaggaatattttcatcaataaccagccttttcatgtgaagatgctcgaaaaagttttcatgatggagtagccggtattcatagccaactattttttctgatgaaaaaggaatatcatcatcgctattgtcgtatttaggttgcttgaaataagccattttcgcaacggtaaaatcaaagctcctaagtatttcctccggcgtaccaaattcagattcgataaattcaatccatattttttcaccgtctttctgaaaggcacataccttttcattacgatatttaaatttccagccatctttcacatagccgtcgctattgaataaatctactgcatcttggaagtcatcgttgctttcaaagaatatatctatatcttttacacgttcaccggaaaggatgtttttaaaacacccgcctgcaatgaacccgttgtgaccttccatatacctgtcaagccatctgatttgccaaaagttgtcaggggtgttttctttatagcttgtattcatcgctctattgtttttagtttctactaaatttatcagctacacgttcaataacttctgcattttcttcggaaagccattctttagcgacattccaagatatacttttagaggccttgaaattatcaaggcgtgtggaatgatgtgacaaacgtccttcggtaggcttcaatcccttgtcatgaagttcacatagtccgttatggtaaaatatgcagtattcgtcacccgcaacagcttgaatcatggggatgggaatatcaatcacgcccatgattatcccggctccccacaaagtgggagccagcctgtcggcatatccggcatctatgagcctctctatatcctgaggagtacccagacatggtgtgtgacattgcatcctgcataacgagcatttgcattcgcatggttttcttccagttttacgtatgatacgttgcaactgggtttcttttatcaatagttgtcccgtcattccgcttcaatcagttctttgacaatatcatcagccacacgaatgcgcttctccatttcggcaaacaccgcttcatccggcaatatccttactatatgaataggattgctctggaaagggttgtaaataacaaaatcagtccattgcgcacctgtgcacatcatatgggccatgcactggtagaaatactcgaacttgacatcaagcagcgacgcattgttgtgtatttcacttttatacttcatgaaagtgctttgaatcgggcatttgatttccagacagcctttttcaccggtttcttcatcgtaataataaccgtcaggactgcttgcgaaatgttctatggcagggtgtttgcatgatcctgtctcaactatatgtcttcctgtcagacgttcatacagctctctggcattttcttcctgatcagtaccccattgcatcgccttggtgttgacacagacctgatgcagatatttctcaaactcgacatcatcattgataatttcaggattcatatccctctctgatgcaacttgataaatataagttttggcagtatcggaaaaataatcacttctccctttcttcattaggagtccgatttgcgacccggtgaagttaccgagccgcttacggaaccattctatagaatgttgtatttccattataacaatgattttcgagtaggtttattattcgcgtagtcttgagtttgatctgtcggttgttccgggcgggggtgatccttgactcctgcggcttttgcagcgatttcggcaagtttgttgctttttgctgatttatcaataatttcctcatattcggcatcctgaatgtcatctgcctcctctttggtgataagccccattgagatttccgggcaataaacacgctgccagaaagcggctgcacgataacggagcatctggcttggcattgattgccatttggaaccgttcttcttggtccagccttccttttcagccattcccatggtgatccagtcaccatgaagcggttccttgtggtctttgtcggacgattcataagcaatgcagcggcatccgtactccggcgtaccttcttctcccttaaactcataacggagtggggagaaacggccacttgcgttaatagtggcaatcaggaacttgctgctgaaagcagggttgccatgcacgatataaagattctgcatacacataagcggattacaccccatacgcatggccatatccagcgcaatcacgcagtttcccacatttcccttgtacgtatccggaacgattgtgcttgttgtgtacatgttggccatgcgctgcatgacctcaaactgtttcacggtttgtcctaccggtgtcattgcaaactcggccgcttgtttggcctgaataatctgtaattctgtaacttgattgttttcttccatcactcttgaatattttaaagttcaacaatatcttggtattccctgaaggatgcacaacctcgtgcgctcttcttcaagttcgtcagtagcgtaatccttttgaatgcattccatctccgagcgtaattcgtttatatcctcctgtataagctgcatgatttcctttttggaagagaaaccgtattcaggcagatattccaacccgcaccctttcactttctcaagttcggcttccagccgtgcaagttcctcattcatgacagtccgtcttataggattcataaataatgccgatagcggagagaatctccctcatccttgcgttctctttctcagccagctccataccggcaagttggaactgcaatcctttcacctgttcaataagctcatcatggctcatctgctgcaactcattgtctgttctcatcattatatatgtttttaagattattttttctgtcaattctcacggcaagtatgagagataataccacgaatgcggatattgatacccaaaatgcggtgtcaagattgtctattgtaccatgtacgatagctgccagagcaaaccaaatgagatataatactttcataacttattgtttattagttccttatagtgatataaagttaactatttttactttggatgcaaaattgtaaaactttaaaaatcagtggcttaactttatataactatttgaaattcaaataatctatttgagcgcggcgtgtttcagtacatcaaaggcgttgcagtaccatcttccgttctgcctgttggcaggtttcttttcggcacgtatggcaccagaacctaccagtctgaacaaccttcctcgtccgcccacgatagtggcggcttctctctgtccgaatgtcttgtcattcaggacgattttcaatacttcctcgtttaacatgatattcaggatttatagttggtacattgcggtaaaatctcacggcagttcgatataactgaggttgacactgatacagttgtgaacagaacgtatcttacgtctgtatccctctatgtcgcttataatgacaggggtctgcaattttactgtatcccttcctccattggcataaacaagctggtagcctgttatctgatatttattttccataatgaattaagatttgatatttggtcactctgtgaggtatcgaacctccatacctggcaaatgaatatagagataatgattcatgcccattgtacgcacctgtgacagagtggagtggtgttcctatcctcacggaccggaacatctggaacttttcagaattagatacataaagaattgtgactaacacacaaacaaaataagactagcatactgatgatcccctcaatggcttaaaccggttgttatcccgaatcttacgggaggggatggggttatatagagtctggcaaatgaatctgtcatatacaaccatcatcttgcattgaacgagcggatgactgttgctttggcatcattgcggtagtcgcatctccagtcattgcgtcccatgcgtgaactgtaataggatcggtagttcctgtaatcgcggtttccgtactttgccttatattcagcggcacgccttgcattctcctcgcttattcttgcttcctctttggcttccgtccatgcttttgtcaggcagtagctgaatgtggtattgaacgtgtggccgaaaatgtaatgcgctcttgtcattattctgcttaaatcgtatcttttcatatccttgctgtttatggatttattttgatattgtaaagatactttattaaagtggattatacaaatataaacaactgattatcaattagttaaactttgtttaacgtgatgtgctattgatattgaatgctgttactaattgtgttgtaccactgagtgaactattcaatatgaatcttataatctgatatttttaaaactcgtgcctgtacggaatattcactacgtccgcacaggctgtatctgaaggtcatactttcagcgatacttgtgcctcacaccaagcatactcatcacgttaaagacaaattgatgtgctgaaagttttctttattgtgttttccaaaatgtcaaagaactctttaaaatcgcgcctctgagccaattcgattcggcaactcatgtctttttcagaggcttttcttaactttgcaatatcaacttataaaattaagaatcatgaaaaattttatcgaagttcatgtgataacacatgagaatgcacctactaccaaggtgttgattaatgtatcatctatttttattgttgaatcactcttcaataatgctatcattggcatacaatgccgtcaagtaacaaaaagaatggttttgaatagattaactataatattagtgagagttatgagaaagtcataactcttattaaaaatgccctgtcgtaagccatttgaataattgttcggagcgttccaacctttccgcaagcaaatcttcaggaatggttggaatgttttttgactcacaatatctgtaatagtctttaacgaaagaagctgtattatagctccatttgcgcaactccgcttcttcagcaacagacagtttgtgtcttttgactaacttaccaaatccaaacataatttatttcattctagttactgtaattgttttagcctctctgtctatacgggttttgaatgtctttccccattgcagtccgtatgtggtgcatacagttctgacggaagtcatcatctgaataggataagtaaattcttcacctatcttcatcactctcagcgttggtgtaatcgggcttttctcttctttttctgccatattattttgatttatttattgttttactaattttgtaatgcaaagataaatatattatctaagaaacaagaaaactcagtgattaatcagtggattttaatattaattaaacttgttgtttatgaatgtacagagtaggctttttgatttcatctcatcgaagaagatttcaatatcagatttcgaaagggcttgtggactatccaatggttatgtgcacaagattaaaaattctgtaggcaaacgtggcttgctggatattcagagaaaattccctgaacttaatactgactggcttcttacgggagaaggggagatgcttaacgatacatcttcatatattgccaatagcgaccatcatggaacttctgtagcaggaaacggcaataacgtgaataccaccagcgctttggaaaaggcattggaaagtctgatggaacagcaaagacttacagcgaaagcgcaagagcaggtggacaggttgctgtctttaatggaaaggatgactaaatgaaatttaattaataatacactatggaaacatttacattaattctagcaatcgtttgcttggttttcggaatcttgcagataatcttgttcttcaaggtgtggaatatgaccaataatgtagcaggcatcaaggcgctgtacgaaaagcaaaacagtgaaatgttggcactgctgaaaacaatagcgtcggaaatgaaggaacccaagcagcacaacaacaaagagagcaaaggtgatataaaggtggtagcagcaaccgaaatcaaaaaggagagcacttcagcacaacagccaaagaaagaacgtcctactatagaccgaagcagtgaagaataccagcggaaaataaagaagtggaacgtcttaaaatcccgtgggtatatcgagcaggctgtaagggagtatatggaatacaccggaactgaacagaatgaagcgaccgaatttataaacaacttataaaataggtatggatttcaaagacaatatacttcagcttgcagaaaggataaagaagcagaaagatgccatccagacagaggaagccaccaaaaacgccttcatcatgcccataataacggcgttgggatatgatgtattcaatccttttgaggtagtgcctgaaatggactgcgatctgacaaggaaaggtgataagatagattacgccatcaaaaaggatggcaggacgattcttctgatagaatgcaagcactgtaagcagaaccttgacttgcacaacacccagctttcaaaatactatgctgcgtccaacgcacgctttggggtgcttacaaacggtatcgagtatcggttttatgcggatcttgacaagacgaacatcatggacgagaaacctttcttggtggtgaatatgctggacttgtcggatgcagatatagaggaaatgaagaagttccacaagtcatgctacaatgagtcggaaatactcagcacggcaaaggaactgcaaatgatgatacagataaaggagattcttgcaaagaatttccagtcgccgggcgatgagtttacgaggtattttgtcagaagtcttaataacgggaaatccacaccgaagctgatcgaagaatacagaccgattgtgaggaaatctatcttgtccgtgataggagggatgatttcaggcagaccggataccgccatactggtgaaagaagagaaaacacgacaagcaccgaacgatggaatggctgttataggtgacaaacaagatgcagtgattacacgggaggaaacagacacatacaatataatcagagctgttcttggggaacaaagtgaaatatcatataccagtttcaaaggctatctgctgatttggactggacatgaatattggtgggtatgccgtgtatcattaaggccgtacagcaagcggatatgttttgttacagagaacagaaccggatataaatggattcagttacaatcaatagaagatatccgaaattattcaaacgagataagaacggcttttggaatagcctgcaagcaacggaaacaatatcaattaaaacataagaaatcatgattattgtatatgttacttgcaaaacacaacctttattctttttttgctgagtaacgggatatttacatttccggttcaaagtcttgataagctagttataatcatgcagttcgttcagagagtggtccaatccgaagatgccgggaggtacttccttgcgccatcctttgccaaactttttatccaaatatcggaaaacttcttcgttataagcagtcagcagatggttgggagtgcttaaataacatgtcagtttaccatcttcattcaagggaaagaagctgatatacgtaaccccatatttcttccaaaagggatgcttccttatgacctcttcttttccaacaggaataatgagcttcagattgggtttccctttgtctatgtattcacgagacaaggtcggtgaacaatcatatttttcgatatactcataccacagaggaagcgtaattcgcagtgtgtcactttgaaatggtatagtaacaagagtgtcgcatgaattcaaaccgacaaattgggcaaccaactgatactttcctcttttcaaatgctctatcttgaatgttccggtagaatcagtaagccaaccttgaaacggcttttcatccatagttaggtatgaagcaatcattgccctcttagtgacatcgtaaggaggaatctgccgcacttcttcgccataaaccttgcctatgagggtgtattccatagtatcgtttgcttgagtggactttagcttgtcttcccaaatggtaagtacaaaatccttaaattcaatcgtgtactttccgttgataaacaacacctcccaaggataaatgctcttcagcacttctttaaatgcttttgccaaaggatgattcttgtcatcaatgttttcccgttttggacgaacggacataatcactacatccaaatccaccagacgaccatccgaatagcattgcatattatttacccaaaaggtcatgcgtttccctttgtattccggaaagcgatgccaaggaaaacgccggataatttcatcctgagcatgctgtattttcatgccagcccgtagggtattatggtaagtctggcagctttctatacgaccgtgttgaagcaccatcacttgttccgtttctagattgcggtcgaagccgctgtgtacataacgcaccagctcacctttcccggcacgaagttctccgttgaaccagcgggcacagattttcccgttttggtaataaggttgaaacacttttttcaattggtctggctgataagtgagggaatactcttctttcttctgtttatcatagacacagacttccaaatgatgcagatacagatgagattgctgcacttcccaataggcggtatagccttcccaattggcggtagtaatgcaatggttgtccggcaagaattccatcaaccgatgaaacaggatagaatcccggttgatgggcttgtccaataacacccattcttctccctgcagataaatgacatcaccggatagaccggtagccttcccttcccaaagaataagaaagaaaagaatggctgtcatcatacttttgaaaaatataggtatcttcatggcacgttctaatattgaggattatacaatacggatactatagataagttttctgcttgctaaagttatttttctcccttgtaatgctctgtgtttcagattacagaatatccatcatctttcccataaacaaaattaaacctgttttattttcatggataactaacaagaatggacgattgacatggaatggataaggtgtaatctctggcactatttctgattcaaaaacaacatttgtaatagtcgctgctgctgcaactgtgcctgtttccgttacttccaatcgggtaaattgttcgatttcagaaatataagcaggcatatctgtcatacgtgaaaagtctgcacaatttgcattaaaagcatcatggatgcccattttctggaaggtaggaatgatgttggatttgtaatccaacttgatagaaggtaatttgaggtccagcatacaacttatactatctgatgcggacagccatgctttccaattggcttcactaaatgtggctatgcaggagtcaatggatacacctttcttgggaagaatcactgtcatggcatacgaatcgtttccgtaagggagggtagccatttcaaacaattccgctttatgaaaagcaaaccattgatcagacaggtgcatcatgctgaccggatgcttctttccactcacaggataaaagttttcctgccgggtttcagccggatcaaaagggaaaatccatccacttttgaagaacaacgtattgatgagaatacaattacccatagtttgatccaagattttagagatacgtccttgagtttgttcttttgtccattggtttataatatcggttgatttaggatctgaaaagtctagattctgtgtttctgcaagaaaatacttctgattaatttgttgaaaggtagcctttataggtgactcgtcatgaatccaaatggaattggctgattggaagatagtcgtagaatctaattgaggtagattgttcatcagttttaaaaagtagctattgatagattgaagcttgcttccagatgcagaaagtacagattctatttcttgtaaagtctctcctgagcctccgttggcaaccatccctaaattgaattgggcactcagaggagaaatgaaaaaactttgtcctttctcctgttcattcatcttttgaaaaaaactgcaagcaaagtcattactgatggataccataggcatctcttcttccgaaagttccaatgaagataattctacaaaaggtttgtgggatgaagtctgttggcaactgataaagatacagaaacttattccggtagcaaatagtaaaaagtttttcatgatgacagttttttttaattcaatatcagaattctttatatttttgtttatatttaaatctgtttacaattaccttctttagacagttaattaaccggtatttcaaatttgatagggaatgtatacttcactttgaggttcactccatgttgatgacccggtttccacttgggcataatcgaaacaatgcgaagtgcctcttcacataatgcagcatccgcacttaaaacagggttgacactgcgaagaatgcgaggctgggtcaccgttccgtcattatcaatcaccacctgcatgataactgtaccttccagtttgctttgcttggcagcttgagggtattgtatattctgtctgataaattccatcagtttgggcacgccacccggaaactcaggcatatattgcactacctcaaaaacatcctcttcatttggggtaacctgattaccggagtaattagcaggtcctacaggaataggcttttctctgtatgaaacctgctgtgagatgtaggcttcaaaccattgatatatgttgtagaagcaagtttcatcttcattataaagtctgatttttaggagatagtcacccagttgaacatccttaggtaagttgactcctatctcaataacctttgaatcattcaatagaatggcaatagattctttgcttattttctcatcgtgaatctgatgtaaattcttttgtttgtcctcgcgaaataaaaatgcttcatgtttataaatcaaatgaaaatacggacaggcaatggatacatagactttatcattcgaaattgaaattcgttccacattgatttcttcacttttgcacttgatttcctgatgcgtctggtcgtttaaacagaccttggttactccttctgcatcatccactaagtgcccccattttatagaggaagttcttttgataggcagatcggcatttacaggaggaatgtacttaatttctacgactcctgtatcattcggattacacagggaatccttatcaacaagcgtaatgtgatcctcgatgcggaaggttacaggaaaaacgtattttactttcacggtctctccgttcagtttccccggcttccagtctggcatcattcttacaatgcggagtgcttcttggtctaacaggggatggacgctgtatgctactttaggctgtacaacttttccgttgcggtcaatgacactctctatccaaactctcccttgtattttcttgtatatggcagcaggaggatactgaatgtgggtctgtatatattttatagcttccttcatgccacccggatattcaggtcgttcttccaatacggcataaatttctttatcggaagtattcttttttaaatatagtaataaggtggagtccaccacaataaacgaggtgtcggtttgggtggtagaacattctttcgtttccaacttctgtcgttgctgaatgcaagtggttgaaagaaggcaaaaggatatcaaaaatacaataccgcttctcataggcaaaaacaatttgtgaaaacaaaggtatttcgaaaacatacaatattcgtaagatgcttggcatctgctgttattattatagtcatctatattccacgctgattacatcggaagaatcgcgaacagcttctttgatgtctgccagccggaattcggtcatgagcataattttctgttttttatcggttaattccacctcatagaagaacctgtatctgcccggtcggttgggcaggacattcgggtttaagtgagctttaaacagaaattgtttcccaggtttgatgatatagccaacgcagtggaagtttgtatttatgggaagagttcgccagactccatgctggttttcataagtaatccggtatgggtctccacaccctatctcgtgctcgctctggttgaataaaacaaaagtggcggtatgagccgtgtatgggtatgcagagaattcaggatataaatggatgcccaaagtgtcggaagtgtatcgttgattgttgggtgttggttctatgggtccttcaaaacggatagcgggtgagtccatgaccttcttacggaaaacggctctggcttccggagagtttagacataaatttacaacaagatgattaccttttatgcccgatccagatatattgccgtctaatcgagtaccctctatttctgaacgcgcatatcgttttcgcagttcattctgtatcttttgcagttcttgctctgtaaacacagaatcctttacactctgagtagctacaggaagatggcagatcgtgtcttgggtatgaacggagattgtttgagcgccttgtgtaatcgaagctgaatcactctttaccgcaggctgattgttgctggacggtttaccgctacaccccacaagcaaccataccaagagaagaatcaataccattcctaaagctaaataaagcattgtcttaaaataggcaaccttatccagctcttctttttccaaagttttctggcggatatcttctattttttccaccgtcatctgagagaggtcagtctcttttcctgtatccaataaccggtggtaggtgtctgttagcctctcccgattccgtttgcgcaactctcgattttctttatcgcgttgcagcatgtcgttgatacatcctaatgttcccatgagttcttaattagattatctgccttaaaaataacaataaaaaatgaaatgttaaagaatcaattagttaaatgcttcctttttttgttttttataaggggttagtaaaattaagaacgaaaggtgaggacgttgatttaattacatcacagatttgtaatctaataatgccccaattacgagatctgttttaatatacgtattatggaataatatccttgatcttcgttcatgtagaatccatattacacagccagtcagacatcttggtatgcttcgtaatacagtagacattttaatccctaaacctaaactccgaggatgtatatcagtaaaaagaacggcattacaagctcctctatacaattactatcaaatataaccatggttatactaccagataaattttattttgaagttacagatatcggaacttctttcaccgtttacgtaaacggtattttttcatcaaaaaaattatgaatattggattgtattttaatttgtatttatatatttgcgttgaaaaataaaataacctttaaaaaagagcgaatttattaacttgttaattgaaaaaatcataatcctcaaatccgcaactacgcgcctaatatgatacagaagcgaaaagaatctgcatcgttagtaaaaagggggcacagtgcatcgaatgtcaccataaagacatataaatgccccttaccccaccatgcgacttgaggcaatacgcaaaatcacgactataagttgtcggtgttatccaaagtcattctggaacacattggcataagcattgttgcatgaatagatattcagcacatacttccttgatgtcctgacccatttggctggcacagagatgaacttaaagacaaacgtcttgatgcggcttgttgctttgagtccgaacctcttcacgtcaagcctcgccatgatgaatttatagaagttgcgtatgagtgccataagcagaagaaacaccgtgttttctcccataaaggattttggaagcctgttccagccgaatccgttattcatatcatcgaagatgcgttccttccctccacggaggttatagaattcgacaatctctttctcggaagactcgtagtcatttgtaaggatgcagcggtaggtgtattctccttcccacaggtcgagttcgccgtctatccgcttctgtctttgaatcacaagacggtatgccttccctttccatttctcgatgagaatggaggccagctcaaactcaatgccgcccaattccactttcttccaacctctgagggcaaagatgtcattgtagagcgaactgcatcggttagcacggatatagaaggtcttgcagtgtttagcaatctcttccactatctcttcagaacacgagccgcaatcagctctgaaacggttgataataagcttgttttgttcaaacctttcaaagaacctcttcagcgtgtccttctggtggaaacggacatttgtgttgccgtcgctgttctcaatgccgacaatcaagttgccaataaccgccacgccagggcgataaccaaggaacttcttgtatgtaggcttcgcatcaaacttctcagcctctatgaactggtggtcgaagtcaacgtcatacccctcgccctctttcagctgccctgtggacaataggcaattgaggagcagtgtattcagcttgtctgccgtgttgaagtcgtaggtcttgccagtgtcggatgtgtaggaaatgttatcctgggtcagttcctttatggctctaagaatcgtgtcggcactgcatgtgcgaagtgtcggatgaagcgaaaggtggtacatcagatgagtggtgacatcctcgatgcatgagccgccacaaaaataaacgctcataagcgaacggatgatttcgctgtattgataaccatacagcctgcatctcataccgagggttgagtcgattacagatgagagtctggagtcaaattgctccattattgaaaatattcctccaaaaggagtgagtttctcggatttaattgctacctttgccatgtctgtcgggtttgatacatattttgatttgcaacactaagataggtgaaaaatctgacatggcaaattcctgagcaactttttgttgctcaggtacttaaaaagttatatttgtaatagtgttgcggaattaaggataattagaaaaactgcttaaaaccgaaatagaaatcacagataaattttcataaaacacatcttcaaatattaaagctatgaaaaaagagcgactaaagttagtaagcgctatgttacttttatccggcttttctaccggatatgttcaggccgcctctcatgcagcggctgtagaaatgcattctgtacaacaggacaatgcttgtacgggagtggttgtggatcagaacggtgaaaccgtcatcggtgcgtctgttgttgtcaaagggacaacgaacggaacaataacgggactggacggagatttcagtattccaaacgtaaagaagggtgatgtcattgtcgtttcatatgtgggttatatgaactctgaaatcatatgggagggcaagcccttgaaaatagcactgaaagaagacagcaagaccttggacgaggttgttgttgtaggttatgcgactgtcaagaaagccaatctgaccggtgcggtttctgccgtcgatgacaaagtgctggcagaccgtcccatcgtcaatctgggacaaggtttgcaaggaacaatccctaacttgaacatcaccaccagcggacagccgggaaaaggctcaagcttcaatgtccgcggtgaaacgtccatcaacggtggtagcccgctggttttggttgacggagtacagatggacccgaacctgatcaatccgcaagatgtggcaagcgtatctgtattgaaggatgcagcttctgcctctatctatggagcccgtgccgcttatggtgttatccttatcacaaccaagagcggccgcaagaatatgcctacacaagtgtcattcgatgcatctgtctcattcaacagtccgacaacccgtccggaatatatgaattccatggaatatgcgcactggatgaacgccgcaaacaatacgaccagcggccgtgacctgctcagtcaggaggaaatggagcatatagaggcttatttctatgatccggtcaacaaccttccggtctttgtggcaaaggaccccagcagctggcagtacggaaactgtcaggccggcaaatatgcctattgcggaaatacggattggatgaaagagatgtataagaaaacttaccctgtccaaaaatataatgtaaatattaacggtggtagcgacaaggccacttattatacctcggtgggttatatggaccagggatcactgatgcgttacggggatgagggcttccgtaagttcaatatggtgaacaatatcaattatgacatcaacaactggatgcacgtatccatgaagacaagttatatccgtaccgaactggacggacttgcccaggatgccgtgcacggagagtcatggatcggtaacgacacacaacctctcatgcctgtaaaacatcctgatggtaactggtcaggtcaaggtaattacaccaactttgccgcagttttggatgagatgggttcacgtaagaccacgaagaatgacttctggaacacccttgccttgaaacttaccccattgaaaggactgacaatcaacatggactatacattcaactattatgcggaacatggcaaggtacacagaaaaacattcaacgaatacggtatagatggcaaattcttacaggttttccaacactccaggccaaacggcgtgtcagaaagccaggccaatgacacatacaacgctttcaacctgttcggtgactatgaactaactttgggcaaacattattttaaagtaatggccggttacaatcaggaaaccaagcatacccgtggcttctcggcaagccgggatgagcttatctccaatgaccttccctcaatggacgccgctaccggagagaaatatgtgggcaattcggatgacagctgggccacaagaagcggtttcttccgtgtaaactacagttttgcggaccgttatctgttggaggtgaacggccgttatgacttgtcgtctaaattcccgaaagatgaccgttccgtatttagtccttccttctctttgggctggaaattatcggaagaaagctggttcaaacaagccactaacggattttttgatgaattgaagataagagcctcttacggtagtctggcaaaccaggctttggataatgggtggtacgcttatctgtccaattatggaacaggtaccttgggatatatcatggggggaaaacagccccaatatgtattgcccggtggtcttgtaagcaataccgttacctgggaaaaggttacccagtgggacttggggcttgactttgtcatcctgcagaaccgtttgaagggtacattcgactattaccagcgtaaaacgaccgatatgttgggaccgggtagaatattgcctaatatcctaggtatgagtgagcccttggagaatgccgccgatatggtaacacgcggttgggaactggcattgacctggaatgaccagctggacaacggactgcattacagtgtgggattcaatctttctgacacccgggcggaaatcaccaaatatgacaatccgaccaagtcattgtcttctccatattatgaaggacagatagtcggtgacatctggggatatgaatccagcctgttccagtctgccgatgagatagcttcggctcctgaccagtccaaactggacggcggaatcagcaaagtgcccggtgatatcagatttatggatattgacggtaacggtgtcgtggattatggagagaatacggttgacaagccgggtgacatgaagattatcggtaacaacaaggcgcgttaccgttacggattcaatatctcggcggactggaagggctttgatttaggaatattcttccagggtgtcggaaaacgtgacctgatgctcccctatacatttaaatggcaatacggaagcatgtggcaggttcctacagctgtaggtaacgattactggcgtgaagacaatgcagggggctggcttccggtggcacgtttcaatggcagccgggctttaggtcaaaaccagacacgctatctgcttgacgcatcctacctgcgtctcaaatcattgtctttcggatataccctgcctgtttccctgacgaaacaatggggaatacagaaatgccgcgtatatttcaccggagagaacctgctgactttcaagcatactccggaaggatttgacccagaactggacgatccatacaagtatccgcagcagaaatcgctggctttgggacttaatgttgtattctaatcttaacacaaaacttttatgaaactaaaatatgtactttatatggcggctgccctgtctctgacaggctgtaatgactcttttctggaaagaggcccgcaaaatttgaatgaccagagtttttggatatctgtcaatgacctgaaagcctatgccaatgccttttatggtctgataccgggaggagtcagtgttctggatgacacggacagtgacatccaggtccccaacgatatcaattctttcctatggggacaatatgtcgtgcctacagaaggtggcgtatggcaaaaatcaaactggcagaatattcgtaacatcaattatttcatgacacattatcagagtgtgcaggctgccgaagcggatgtcaacatttatgtagctgaaatgcgtttcttccgtgcgctggaatatttcaacaagattcagcttttgggagatgtgccttggctggaagttgacctgaatgtggacagcgaggaactgtacggtccgaaaatgaagagaaaccaagtgttccaaaaaatcatcgaagatctggatttcgccatccaatggctgccggaagcaggcagtgaagaagccaaccgcctgaataaggacatagccagacacgtaaaggcacgtttctgcctgaatgaaggtacccattataaataccatgatgaattggaatatgcctcagaagcagaaaagtggttgcaaatggctgcaactgaaagtgacaagcttatcacatcaggaagatatgaaatctataatacgggccatccacaagaagactatttcaatatgtaccgcatagacgacaagagtgacctgaaagaggccgtcctctacgtggattataagacgaacatacgtgaacacaacatggcagctgcaggacgtgaggccggatgcggtttctccaaaagttttgtagaaagcttcctttgttcggacgggcttcccatttcactaagtaataaatatttaggcgatgaaacaatgagaaaggaaacggccaaccgtgacccccgtctgaaacagctgatcctcaccaacgattttccgacaaacgtgacagatgacctgaaggactctacttttgtggtgaatgaggatgagtttatcacccagcactgtttcacaggatacagacctatcaaaggattcaatcccatatactcacaggcgttgtatatgaaaagctccttcgatggcatcgcttaccgttatgcagaaaccctgctgatcaatgcggaagcaaaagcggaattgaataccatcaccaatgcggatttggatagaactgtcaaccaattaagagaccgtgttggaatgcctcacctgacagtaaatgtaggttttaccgatcccaaatggccggactggggatacagcctgagccctgttttacaagagatccgtcgtgaacgctgcattgagttggcaggagaaggtttcagattcaatgacctgaaacgttggaaagccggtaaactgctcaataatgtactgacttatgtgggaaaaagaaaacctgacggtaatctggccattgtatatcccaactacacgaatcccgacctttcatatcaggcaggaaaaagccgtacttgggaggacaagatgtacctttatccgattccgacaggagaacttcagagaaatccgcaattgttaccacagaatccgggatggtagatgtagtaacaatagatttcccagctgtgatttagattgacaaggaaaccaccatgggcagatatgtactggtggtttccttttattttatcaggtcgatttctatggaataaccttggtttttctttattgtatgtacaacgtagagtgaaattgacaaatatctccaatgatgctagtactgatatcaaggcacaaagtatcgacatatccatagaatagaagtggaagatggggctgtctgacaattttgatttgtttttggatatagagccttcttttctcttttgggtaaatgaggataattgaggacgcaaacttacccatatagctgtggatgttatagataaagattttctatctgtgggatggcgttcgactgaagtcggattgaacttccgaattatcggtatggctcttgcttctgccagagaagaacttgaaacagtctacacagctagttttattacaatttgcttttccgccattttgatgtactatattgaaaggaatgcacaacctaaagtctttaaaaatatcggtgacggaatctggtggaccattattacatttgctacagtcggatatggtgacatttatcccattacctttttgggggaattattgggttgtattatttgtctggtaggtgtgacaatggtagctattccgaccggtatcattagttcttcttttatcaatatcgtacaaaagaagaaacaaaacctagaaaaagaaaatgatagtcaataagaaggttgatataatgaacttttgctaatagataggttgtaaaagagattttgtagcgtttatttgcgattttttctgcaaatagtagacatatagataattattgttatttctcaactacttaatagagaatgggaaactttagttatatgtagataaaatagtacgagcaatattgtttaggttaagcagaatggtatgaaggattgttttaaagtatacttttttgtaatgggcagtattagacttatattatccatattttttatgaatatcatattttataaatatcatatacggaacaaaaacttctttgttgaagttttgtcccgtattgaaagttcctgttctttatataatccttaactcggataaatcataatttatgcaatatgaatattatatgttggaaattattgtttgggtgtgccatcttcattgattctgatacttacacttggtttaccttctatctccaattccactatataatattttcctttaggagtatccacttcatcggcttcatcgtccaattccgctccttgatgttcctttaaagcgttttccacagcttcttttactttagcgggcaatgtgtcatacagaacctctttagcagtggaaacccatacgttattaacaaagcaaacttccagttttatagcctgcaataggatatcgacttccagcacatgggtggttttgtctaaatctgtttcaagcaacttatatcctgcatatttttcgttcaggattttgctcacagcatcaggtaaagccgtaggcagataatcttcggagtcatcttccttgtcagctacttctttcaataaatttcccttggtatcgaaataaaggtcatattcttcattgcctttctctacttcgatcacatatacagtttccatattcttgcgttcgagcatgtcaacatcatcacgcttccaaccatcgtatttggtgagtgcttcaaatgtcgttttcacttccgccggcagtgcttcataaacaatatccgtttctgtcattagccatacgccatttacgtcaaaccaggcttctttttctttattgtcttgattgaatgttgctatgtgatttgttccacgggtactccagtcatgagcgatattgccgaattctttaacaaaggcattttctaattgttccgaaacaggagcattgtcatcatcgtcacaactttgcattgcgaaactaagtaaccccatagccagcattacgaaatacatttttagtttcatagttttctattttttaatgtgattaatttgtgtctttatttcattctcttaaaattagtcatgaatttgccttatctgctaattaagaacaaagtaaaattgaatttgtttttttaaatgcagatattcattttataaaaaacaagaggcttgatcaattctttttatcagcaaagattttccatacaccggcacttaacgcagcacccacaaacggtcctataataaagatccaaagttggtttagggcttctcctccttgaaagaaggcgggggctatgctgcgggcaggattgacagacgttccagtataacggatacaagcgagatgaatcaataccaaggaaagaccgatagcaagtccggcaaaattcccggctccttttttctcatccgtagtgcccaatacaactagtacaaatatgaatgtaaagactatttctgccagtaaagctccagtcatggaaacgccttcttgacaggcattggcaccggttccctccaatcctgaattggaggttaatgtccaaaggatggttgagccgataaaggcaccgatcacttgaaacagtatgtacatggcggcatccttcccgttcatacgacctgacaagagacaaccgagcgtgatggccggattaatgtggcaacctgagattccaccgacagtataggccatggctacaacagacaatccgaatgcgagagccgtacctataactgtagaagccagatttggctctgatgatgtacacgacagactaactgctgtaccacatcccataagaacgagaaccatagttcccaacatttcagcaatgtactttttcataattttttaatttaacttatttgttatataatgtttaaaaaggtaatatcactaaagtgtttttgcaaatgtataaataaaaagatttgattgaacagattttgaatagaattagttaaaaaaatatctgttatagttggctttttcttcgctctataactgtgtttataaaaaatgttgtctatatataatataattagattgataaatatcgaaaagctttagtaaaatagaattatgttaaaaaacatatgttataatattacacaaatgtaatctttgttatatttgcgcgtttttattttaaattaaacaagatatgaaaaagattattgtgccaattttagcttgtatgcttacaagcggcatctatgctcagaaagcggtagaaggagtcaaatttacagataactggtctgttggggtcaatgcgggtgtaaccagtccgcttactcacagtgcattttttagaaatatgcgtgccacatggggcatcgggttgggtaaacaggtcacgcctgtgttcggattaggtattgaagccatgacaagtattaatacgacagccagtaaaacagcctttgacaatacgaatttgagtctgttgactactgtcaatctgaataatctttttggaggttatcttggcactccacgtttgtttgaagtggaaacggttgccggtataggatggctgcattattccatgaatggagatggtgatctgaacagtatgtcaagtaagttgggcttgaattttaatttcaatttaggagaggaaaaagcatggacgcttggtttcaagcctgctcttgtatatgatatgaatgcgaatggctttgaaaatacatgctttaatgccaaccgtgcggcatgggaaattactgctggactaaaatatcattttgcatgcagtaacggaaagcaccatgcatctttcgccaaattgtatgaccaaactgaagtggatgcgctgaacgcgcaagtgaacagtttacgtcaggagaatgcggacaagaatgctgaattggaagcggccagtcagaaaacagctgaattggaaaaagaattgtctgattgtagaaaccagggccccacaattgtaacagatactatcactaataacagaaagacattggaatctgtggtaacattccgtcagggtggtatttcggtagaatcctcacagatacctaacgtggaacgtatcgctacttatttgagaaaccacaaggctgcaactgtatctatcaaggggtatgcttctccggaaggaaaggcagaggtgaacgcacgtatcgcaaggcaacgtgccgaagctgtcagaaatatgctggtcaagagatataagattgccgaaagccggatcgcagcagaaggtcagggtgttggtaatatgtttgaagaaccggactggaatcgtgtaagtatctgtactatacatgagaactaaccgataaatacttgagttgtgtgtaggccggagtgtgggaaacatctccggctcttttactgttcatgaattcaggtgacagtgtctttacacacagtttgttggatattaattgaatatttaaatttataaatgtgatgaaaaaagttttttttaccgtattgtttgcgttaatctgtactatgggattttcgcaggtgtcttttaatgtaaaggctggtcttaaccttagtagttatattggtgagaattcagatcactccgaatttaaacccggagcacgtatcggagtggggatggagtatcagtttaatgatatgatatctttacagccttcattgtttttttcgcaaaagggggcaaaatattcaagtggatttgacggaaatgtaatagatgctgatgctgatgtgaaaattaaccagctctatcttgaattgcctgttaacgtacagttccgttttaatattgcagataacaccaaccttgtcatcgcgacaggcccttatttggcttgcggagtaggtggtaaggctaaattcgatggtgacgcatccgttggaggcatccatattaatggtgatgacaaaatagacacattcggtgatgacggactggattacaacagatttgatgcaggatggaacatcggtttgggtgtggagttcggaaagattctcgtaggtcttgatacccaacttggtttttgcaaggtaatggatggcgatgccccccataatgcaaatataggcattactttaggatataaattctaagcaaactctttcatacccccctctctagtctgtgctggtttgcacggttttgagggggattttattataatttttacaaatcattgggaaggaaagaagaagtagtttttttatcaaaatgtaaaattagacagtatctaaattccccataaaaaattgtgtattgcttttttatatctatatttgcaatctcaatagtttattaactaatggttttaaaattatgaaacgaattcaagtattgttattatttatagtcatttcttgttccatgtttgcacaagacaggctttctctgttcataggcagggcgaacaagtatgcagctgtggagttatccgactatcggaaacgtttatgcgtagaatataatatatccaatcaattattagatgattattacagaagatgcggtagtaattggggaaatgtcggtttggctcttgaagtagcaaagacttccggcaggcatatgcgggaggtgtgtgactattacaagcgttaccaccggaatggctggaatcgtatattggtagagataggcataaaaccagggtcgatgtactatgatccattttatgacaggatttgttatcatagcgaatgctggcatgaacattattgctcttattgtgaccatcatgataagcatcatcgcaagcattataaaaaacacaggcatcataaacatcataaatggcacgatgatgacgatgattgggatgatgacgatgaagacgattaacacacttatatattttaaaaaatgaaaaagatctttatttttttaggactgatgtttgtcatgttgagcggtacctacgctcaaaaaggcagacaggcaattggatttggattaagttacggaacggaaattgaaagtgctggattgggaattaaataccagtaggcactataaaatattttgtgtaaatggaaatacgggattcagaaatgagtctcgtattttttattttatacatttgcaaaatgaagaagcttatgaaagaaaagaatcaagtagtgcctgatgaggttttaagcaagtttatcagtcagttcaagacagaagccgatgtgagcaagtttctgaagcagttgcatgcccaagtattggaaaagatgcttgaaggtgaaatggatgcccatttgggatatgaaaagaattctgtgataggaaataacactggcaactcccgaaatggcagttatccgaagaaaatccaaaccgaacatggagagtctgtcatttctattccacgtgaccgtaacggccagtttgagccgatagcagtgcctaaacatgaaagccgtggactttctatagaaaagctcgttatctccctatatgccaaaggaatgagcgtttctgacatagaggaagagatgcgtgagatttatgaaatagagctctctacatctgccatttccatcattaccaacaaggtcaatcaggctgcccaggagtggcagaaccgtccccttgatcctgtttacctgatagtctggatggatggtattgtcttcaaggtacgggataacggtaagatcataaacaagaccgtttacctttgcgtcggactgaaacagaacggtctgaaggaagtccttggcatgtgggttggcaaatcggaaagctcttctttctggatgggtgtcctgactgatttaaaagcccgtggggtgcaggatatcctgattacctgtactgacaatctgaatggatttacggatactatccgcagtatattccctcagtcatccactcaaatctgtgtggtacatcagatcagaaactcctgtaaatatgtggtttataaagataagaaagagtttacggcagatatgaagaatatctataatgcacccaacaaagaggttgcagccacagaacttgacaatctggaaaagaaatggggaggaaagtatccttatgctatactttcatggagaaacaactgggatgatttgactgttttcttccagttcccgctggaaatcagaaaaataatctacacaaccaatctcattgaaaacctgaacggaaaaatcagaaagtacacgaaatcaaagctttcattcccttcggatgatgcagtcaaaaagaccgtttatctttcacttatggagattgagaagaaatggacacagccgattcataactggggcttgattatgaatcaatttatgcttatttttgaaaacagaatccagatataagaacaaacttacagctgaatcctgtttccatttacacaaaattttggacagtgtccagatataagaacaaacttacagctgaatcctgtttccatttacacaaaattttggacagtgtcttctaaaaacataccaagagacagatataattctatatttgtctcttgtattttacaattgcgtatttttcagaataattcgaaataacttcctattaccaccttccccatttcttttcattcaataaatagttcagtcaccaacagccaataaaaacataaaagcaaatattttagttttcatagctcctttatttataattcaacaagccatttaaatatcgctcatcatcaatacgaataatcctgtacctcgccccatcacgaatattctcctttatcatctcattccatcctttcatatctcttaatctaaattcaaaaacctcttccgaaattttcaactctgcaccattggtaacattgcaggtaataaaacctttatcatccattgtgcaatgtttataaaaacgatatgcggcagccttcatttgatagtcagcagccttgatttcttcctcagacatcttccccttttgacgcaacgcataatactcatcaggtattatgctgatgaattcatcactttcaatataatctctaacagattttacttcaacagaacgagtctcaacagaatttatcttgcccttatctacggtttcttgattattcgtacaactacaaaaaacgagcaaaagcaaagctggcaaataaagttttttcataatattacacatttataatttaacaaccataatacacttatgataaagaaagtaaagaaatacaccttttctacttccgatgatagttccacttgttgaattcggaccataaacttccgcatcagaatcattcatgacactatctattaaaaacggaatccaacttttctttatattccttatactgtaactttaaatctatcaagtcaacatcaggattgtcaactaaaaggttattcacattctctatttctaaaacaactctatcataattcatcttattcactcccaactctaaagctttagtctcagatatatcaacagaatattttctattaaccttatccaaagttatatactgtgacataataatagaggcacgtcttatttctttaaccttatcattcatctttatgtagtcaatgatattcaagttcaattccgccgcatcttgaatatcactctttgatgcacaaaaacttattgtcttttgttctttatcacttacaactcccgaaatcgttaacttaggaatacaatgtgacgctgttacaaatctagacttttcaccatgagttcccctaactccgatactcccactatacatattattattagaaactccatacgatgaaaatttaccaccaagatttatcaacacagaactacgtacattgctttcctctctattaacattatccgaatcaacaggactatctataataatagacgtaccatatccaaaaacaatagcaggagaattacttattaaacgcttaaataactgaatgttttcttctgaacaaacctccaaatcaacagagactctatttttatcaacccaaattcccactccattccaagtcaactcatcagggaaattcccctcacacaaaatatcacttaatttagaatttaattcactcaattcatcaaaagaataatcacaagattctacctcaaatttatcacttcccgcccttcttatcatatcttccttacctttttccatattcccttttataaggacaacaggatacccactatcattagtatacattccaccataatagtcaggataaacaaactcaccaatgttccccctagtataggaagtaaaagacttagaaatgttcattacaagcctctccatttccatagaactattaacaataacagaatcacccttatttgcagattcatcagaacaagctacaaagttaactgcccaaatagctaacaaataaaaatacttcttcatagcaatatactttaaatattaatagctataaattaagccataataataaagatacacaacaaaacaaatcactttaacaataaaatataacactattaattaggtggctctttctcaagataaacatcctgcaacaactcatcctttcgagttaccttataacggcacagtacttccccggtttccatattataccaatcagctaccttaccttttacagatatatatcaagtataacaaccatcatccatattcaaacctttcacatcaagaaccaaatcctcatcccgaaaatcattcaacacttcatcctctatcatagtgcagaactgaccgatcaaagcatgcaaaacaccattaaattaaaaatccagagtaaaaatagaattttttttctatatgataatattatttgaattgcaaataatattatttatccattgttttatttattattttatctatctttgtatattgtcaaaataatcagttatgaatatatcaaaagaaggaatagcgataacaaaacgtttctttgaagcgatagatatgctgaaagcacagaaacgtatgcgtgggcttcttacatacaccaaggcccatgatataaattattggaacataaatacagtcagaaaccagccggaagtaagtgtcctaaaacctgaatggatagcgtacttggtccttgactatgggatttcggctgattggattttgacgggtaggggagggatgtttaaacaataaatgttcaaaaacttatccttataatcaaatctgttgtttgtaacttatttattttcagattattgattaataaaatggagtctgctttgggagcagggggtcgtgggttcgaatcccgctaccccgacaaaagaaaaagactttgataatcagtgatattaaagctgttttcaaagttttttttattataaaatcttcattttattgattgaaaaaaggagtttttgctcatcaatggatacaaaacttatcctttaattttaatcagtatggcaattctcaaactaacaattttcaaagcaaaagttttaaaggatggcagacataaaattagagtggccgtttaccataagcagaaaacttgctatattatcattcggtttatcatagataatctcttccagttcaagaatggagaggtggtaaaacgctcggatgccgcaatgataaatacaaaattgcgtaatcttctcaataagtaatcaggaaagactagacaaaatagataattctggtatctattcatgcacacagttgaaggattttatcttaagggaatctgtggggatgttccagaaatattttgaatgttgtaacggactatctgaacggaaaacttacagattcgggaatcggttgtctatctcatgagcaccatcaatgccatgaccataaatgaataaaaggtgatattcaataagaaattttgcatagccttagcaaattacggactcatttcaaattatgataaagaagacttagaattcacctcctttgtctcaaaccctagtccggctaatcagagcttgtctttacttctgaatctttgtataccaaagctggacttatcaaaaatatccattaacaatcaatctagtctataaaactatagctccaacccaaggattagcattccagaacattatttttatcccaaattaatttttttaagcaaaatgttttttattatataaatttgattagctttgagaagcaaaaacaaaccgttttaaatattcaaaaattaaacgaccatgaaaaaacatttgttgttcttgttggcatgcctgttccttatgacaggaacggtaatggcaaaaattgtaaaggggcgggttatagactcgtctgacaaggaacccatcgtgggagcgtccatttttgtcaaaagtacaaaacaggggacaatcactgacattgaaggtcatttttccttggaaatccccgacaatgtcaaaacaatcactgtttcttttgtcggtatgacaactcgcgaagttgctatcactcccggagaaatgacaatcgagcttacggcagagagccaggcacttgacgaagttgttgttgtcgcttacggcacgcaaaaaaagtcttcgattaccggtgccatcacccaggtcagaaatgaggaactcctgaaacgtcctgtgacatccgtcacttcagcccttgaaggctccacaccgggtattacggtcacaggcaactacggctcgcctggaagtgaccccacagtgcttatccgaggtatcggcacagtaaatggtagtacctctcccctctatgtgatagacggcgttccgtacggaggaaacatctctgaccttaatatggaggatattgaaacaatgtccattctgaaggatgccgcttcggccgcactctatggcaaccgggcttcaaacggagtgattctgatcacaaccaaaaagtcaaagagtgaacgtatccagttcaatttcaagaccaaccagggctggtacgaacgtgccctgccggaatatgagcgtaccaatcccttccagttcatggaggttgaataccagaacgcagccaacgcattcgtacacggcggaggtgaccgtacggacaaacaggcaattttaaatgccgtgaacagcacacttattcccgacagactttatgtcaacatcttcaacaaaccagacgaccagcttttcaccctcgatgggaaaatggctgccgacgcctctatcattgacgggtatgccggcgatttggactggtttgaccaggccacacgcaaaggatatcgttcggaataccagttctcgggatcgggtgctacaagcaagagcgactattacttctcactctcctatcttgatgagaacggatatatgaaagattccgggtttgaccgtctgacaggacgcatggctgtcaacatcaaacctgtgaaatggttacgggccggcatgagcatcaacgcctcacatcagaagttccagaacacgtcaaacggtgtcggggacggctcgtcatcatacagcaatcctttctatttctgccgctatatggctcccatttacccggtacactcgcactatacggaaactggaacggtatatgacaatgccggaacccccatacaggtgaataagggggattatgtgcttgacggtgccggaaacccgcaatgggacggcggaagctatatcatctacgaccagaacggaaaccctcaggaggtcataacccgcaatcagaaccgtgaccgccacgtgatatgggagtcggaattgaatgatagtcggacaatacgcaatacactcaacgggataggttatcttgatctcgtgctgccctacggctttaccgcaacccttaaagcaaatgtgaacacacgtaacagcgattattacaaatacgagaatgcggtcatcggtgatgcacgtggtactgtttccgaggacggttccatctcgggtcgcaacggggctcttgccaaaaccctctatacctacaagaactggactctacaggagcagctgcgctggaacatgacctataatgacagacataacatcgaagtccttcttgggcacgagaactacagctatcgttatgactatacctatacaagcaagaccaacgaggcttttccaaacaggtatgcgctttccaacttctctgaaatggcaagtatctcgggatacaaaacccgctaccgcactgaatcctatctggcgcgcgtacagtatggatatgacaaccggtacaatatcgaagcctcattccgccgtgacggttccagccgtttcgcaaaggaatcacggtggggaaacttcggttcgctgggtgccaactgggtcttcagcaacgaggagtttatgaaaaaatatagatggctcaatcagggcaagttgcgggcaagctggggacaggtaggtaatgattccggctccggttactacgcatattatggcctttacggatcatggacccagaattccaagccggcatacgttgtaagtcagaatccggcaagagacctgcattgggaaaccggagaatcatggggcgcagctgttgaaggacgtctgttcaaccggctgaatctctccgttgaatattttgacaaaaggaataaggaccttattttcagcgtatatgcccccagttcagcaggaggtaccagcacaggttcctccacatcaaccacagacaggaacataggtacaatctccaaccgcggctgggagatctccgctgatttcgatatcgtgaagagcaaggattggactgtcagcgtatccgcaaaccttaccaccaccaagaacaagatcgtcaaacttcccgaacagaataaaaagaaaaccgtatatcccattgatccatcaggaaagcttggacaaagggaggacctgcctgtcggcataacttccggcagctatctcatctccgaaggcaagtcacgatatgactactatacataccattgggcaggagtggacgagatggatggacagtcgctttacgaggcaaatcttaatgattattatattgtacttcctgacgggtcacagcttggtggcaagcagaaactcaacgatgaaggagaactgatgtgggacgccaacggcaatcccgtccagggagccaccgagcttgctcccgagaactacaggctgatcaacgggaaatattatgtgctcaagaccacctatgcccaaaagaaatgggcaggcagcgcgcttcctaccacatacggttccttctcggcaaacatacgctggaagaacatcaacatatctgcaatgttcacctattcgcttggtggaaagatatacgacagcccttattccagcctgatgacacccggacaaagtgccggaaattaccatgtggacctgtacaacaacgcctggcggatcaacgacaggtccaatgccatgataaccacttacaagaatgcctatgatgacgcctacaatgctgctattgcagcaggccagactacatcagaggcgaactatgccggatattatgcggcaaacaaggctgtggacggcaatggacgtatcaatcccaacaccaatcccgagatcaataatctgaccagtaccgacaataatgctggaagtgaccgctggttggtcagccgtaactatctttgctttaagaatctaaatataagttacactcttccgaaaagatggacagcaaaggtcaacctttccactgtccgtttcttattctcggccgagaacatacacctctggtcggcccgtaaaggtatgaaccccatgatgggaataggtggcggccagagcaactatctggttccggcccgtgtcttcacattcggtattaatgcaaccatttaacatttggaaagatgaaaaagatatataatatagtttcaatggcaattctgcttttctgtacagcagcctgttcagattcgtatcttgaactcagtccggaatcaagcgtttcagacgaggtgatttttgagaatgccgatgccgcacaatacgccgtgaacggactgggtcggatcatgagcacacagtacctgggcacacaggggtacaacggagaaggtactgtttatgcgtatcagggcgaatatcctggagatgtgatacagaaaggcagctacaccggctggcagaatctcgcgaaaggcaactattttaccagcagtacgaacagcaacatccatgtaacatggtactactattacaaactcatcagaaatgctaaccagattctagacaactgcaagacggggcttgccaacgtggcggagcaacgtaaatgggactatataaaggcacaggcgctggtctaccgtgcctactcctacaccatgctctcacagctgtacagtcgaagatggacagatgcagacggcttgcagcgcggtcttgtactgcgtaccacagtaaacaatgacgaaatgccatgctccactatggcggagacattcgaactgatctaccatgaccttgatgaggccatcagccttttcacatcatgcggatacgatcggcctgtcgatgtggacaagaggtggatggcgaaccttgatgtggcccatgccgtctattcacgggcagctcttatacgtaatgactggcagacggtcatcacccattcacaggaagctcgcaggaactactccatcatgactcccgatgagtataaggcaggattcaacacagccaatcaagaatggatatgggaggtgttcgaggatgacacacagcctgttcattactattcattctataactatatgagcgccagctgtctcggttctgcatcccgcacttatccaccatgtataagcaaacagatagtagatccgattgatcccgcagacaagcggctcgccatttatgccattccgactccggaagaagtgggcgatgtttccaaagtcagcggctcgggtaaggtgaccaaaggtgatttctacaaccgtgtgaagaaggagttcgccggacgcatatacagtaccacgacaatcttctattatctctccaccaagttcattgtaaaatccgggacaggagacggatgtattcctattttccgtgccgctgaaatgatgtataacgaggcggaggcacagtaccgtttaggtaacgaacaggccgtacgcgcacttcttgagcagaccgtcaagccttataatgcggattatacctgcacaaaaagtggtgacagtctttgggaggagcttaaagcataccgtaaatttgatctctgcaacgaaggccacagctggttcgacctaaaacgctggggagacccgatggtccgcaaaacctgggcagaaggcggaagctgggccacttattttgccgagaagaacaccacaaccggaggaaactacggtcctgccgataaaaatgcatggactgcggttattccaaccatggaaaccaattacaattcccttgtttccaatgttgaaaaaatcaagtctgacggtacttgggatcggaattgagatttctatttaacctcaaatccgcaactacgcgcctaatatgatacagaagcgaaaagaatctgcatcgttagtaaaaagggggcacagtgcatcgaatgtcaccataaagacatataaatgccccttaccccaccatgcgacttgaggcaatacgcaaaatcacgactataagttgtcggtgttatccaaagtcattctggaacacattggcataagcattgttgcatgaatagatattcagcacatacttccttgatgtcctgacccatttggctggcacagagatgaacttaaagacaaacgtcttgatgcggcttgttgctttgagtccgaacctcttcacgtcaagcctcgccatgatgaatttatagaagttgcgtatgagtgccataagcagaagaaacaccgtgttttctcccataaaggattttggaagcctgttccagccgaatccgttattcatatcatcgaagatgcgttccttccctccacggaggttatagaattcgacaatctctttctcggaagactcgtagtcatttgtaaggatgcagcggtaggtgtattctccttcccacaggtcgagttcgccgtctatccgcttctgtctttgaatcacaagacggtatgccttccctttccatttctcgatgagaatggaggccagctcaaactcaatgccgcccaattccactttcttccaacctctgagggcaaagatgtcattgtagagcgaactgcatcggttagcacggatatagaaggtcttgcagtgtttagcaatctcttccactatctcttcagaacacgagccgcaatcagctctgaaacggttgataataagcttgttttgttcaaacctttcaaagaacctcttcagcgtgtccttctggtggaaacggacatttgtgttgccgtcgctgttctcaatgccgacaatcaagttgccaataaccgccacgccagggcgataaccaaggaacttcttgtatgtaggcttcgcatcaaacttctcagcctctatgaactggtggtcgaagtcaacgtcatacccctcgccctctttcagctgccctgtggacaataggcaattgaggagcagtgtattcagcttgtctgccgtgttgaagtcgtaggtcttgccagtgtcggatgtgtaggaaatgttatcctgggtcagttcctttatggctctaagaatcgtgtcggcactgcatgtgcgaagtgtcggatgaagcgaaaggtggtacatcagatgagtggtgacatcctcgatgcatgagccgccacaaaaataaacgctcataagcgaacggatgatttcgctgtattgataaccatacagcctgcatctcataccgagggttgagtcgattacagatgagagtctggagtcaaattgctccattattgaaaatattcctccaaaaggagtgagtttctcggatttaattgctacctttgccatgtctgtcgggtttgatacatattttgatttgcaacactaagataggtgaaaaatctgacatggcaaattcctgagcaactttttgttgctcaggtacttaaaaagttatatttgtaatagtgttgcggaattaaggtttaatttaaatatataaaggacgcggatattctttgcgtcctttatactgtaacaaccatatactattcttcacacaacattgtttgatcatgtaatgttcttatagaaagtcggtaatttgcactccatttttttgtcgtttgtgcattaaatagcacctttgcagaaaaatggataaaatcagataccgtcttgtatataaccgccagaacacactaaacaggcaaggcacgacccttgtacaggttgaagcctatttaaaccaaagaaaaatctacctgaagacaaacgtgtacctcaaaccagagtgctggagccgtgaaggggtacaagtcattaaccatccccagtcaaatgagttgaacgcaatgctctatgaatacatcctgtatctgcaaggcatagagttggggtattggaaacgcggaatacctgccacactctctttactgaaagatgccgtcaaaaagaaaagtgccgtgaatgtcagcttctccattttcgccaaatcagccattgacaattcggacaagaagcagtccaccaaggacaacctgcactcgacactggcggtcctgcatgatttttgctccgggctggacttcaaggatcttacctatacattctttcgtaattttgaacaatacttaagagaaaagggcaatgcggtcaataccatatacttatattttatttaaatttcatttctatttcacaatactttcttttaacagaatggagggttgtatgccaaaatacgccttaaaactatgggagaaatgtgagaaactttcaaatcctaaatccaatagaaattctgacggcttgattttcttttctttaatgagtacataagcttcttccagtcgctttgtcaacaaccattttccgagtgtcgtaccaaacacttttaagaagtctctgcggaatgtagataagctacgtccagaagcctgcgccagttgttccaatggcaggttatcctgatagtgacactccatgaaatctttcaaattaattctctgcaagctgttcatacgagaaaaccaattatgtaatcccggacggagataggtcaggacatttatgcactcctgtatcttgagataagtcaatggttggttagcccggaaattattatcaacaccggcttcaatgcctgatatcagaccctgaaggagtacatgattggttactgtcattacatttatatcttcattttccacttcattttctgcatctgtcatagccggagacgtagcacgtaacagatattctgttacagcctcttccgatatgtggatatgtactacttgcatgaaactcttcgtgtgaaatgaaatatgttcgttacgggccaatatccagccgcatcctttgctcagcgggtgattaatccctgacacacacattgttccttctcccgaatagacatataagaataaaaaatcatcaaattggaatttcataagccgcccgttggtgaaattcatcttatacataataggatagtctggaatcattttatttttcatttgtgaatctcctttattgtttggttacctttaaagcgatatgcgaggttgcaatatgattgcaaaaccatgtaccgatgcaacaagcaacgatgataattccggttgtatagagcatatttcccaatccggtcaagggagaaagcactccaccgaacaggaacatcaaaaatccaagcaatgcagaggcgtttccggagttctttctctccaaatcaagggcaagtgttgtagaactgggcaatattactcccaggaagagcataaaaacaaacagcgatacttccaccggccacacggaagtggagaaaaataaagctgcggctacaaacaaactcattatcccgaatcctatagaacctacacgcaatgcatcggttgcgtcatggaataatgaaaccgtcagactgcccagcattatggctatcgcattggcaccgaaacacaggctgtacgccagcggggacatgttaaaatgctcctgaaagataaagggagaagcagcaatatatgtaaacattacccccatagcgaacgcctgtaccaatacatagcgcataaactgagcattttgaaacacaggtatataattccgaaatgtggcaaacacaccgcaatgttgttgctcgttattcaaggactctttaaaaaaggccaatgccataatcaataatatgcctatcaataccaatatccagaaaatacctttccagtcagtcacttccaataaccccccccccaatacgggggcacaaaccggggcaatgccttgcacggagctaagcatagaaaaaaagcgagtaagctctctcccttcgtagagatccgtggcgatggatttggaaataactactccaccggctccggacaatccttgtagtaatcggaagaagataaatacatatatatccgaagcgtataaacaacctattgtagatatacaaaacaggacaagggaggccattaatgtttttttacgtccatacttgtcactcaacggcccgataaccaactgcccgacggccagtccaaccatactaaaagtcaggctaagctgtacgagcgatgccgtagtatcaaaatatccggccagcaccggaagggctggcaggtaaaagtcggtcacaaacggaccaaaagctgaaacaatcccgataacaaccaggatatacagttttgagtttaaagtttctttcatcataatttatttatacttttattttctgctgcaaagttcataacattctgtcacatccttttgtccatttccatgtctggattgtccggatagtaaccaaatgttgattagagaaatctattttagtctgactttctcctgtaaacggctttgaagctgagagacaaatttgttattgtccatttcgtgatatttgcaagcagataaacaataatccgtaaaatccttttatatttgtatgaacttacttgtattatattcgatgccaattaataaagatatgacaaacaagtttggaatatgtccttccaccggacatttatccgtattatttccggaaaaggaagcggaacgtactccctcaaataagatttttctcgctatagtcttacaaggtggagccatgattgaaattgacgggaagaaccatttaatatataccgggacattgatatatctgtatccaaaccatctggtcagacaaatatctcatacagaagatttgctacttgaatatctttggttcgagtttgaattcctctcggattttcctttattactaaaggcagatatttcagaatatgtaggaaaaaatccttgcttacagttaaaagataaagagaggcaactggtgaagaaatactatgacctgatagctgaacgttatcaggaaagcaatgagtacattgccattaccaaaggattgctgttttcctttattcttgaaatcagcaggttatattccggtaaaaatgtgtcggtatcgaatacacgacaagacgaattgacagatcatttcttctttctactccatcagcattacaagaaagaacggtctgtttcattttacgccgataaattatatatatcggataagtatctgatgcgtgtactgaagaaatccactggacagacttttcatttttgggtaattgagtttattatgcgtgaagccaagctgttattacgttcaacgaccatcagtattaccgaaatatcggaaaaattgaattacccgaacccttcattcttctcccgcgtattccaccagtatgtgggaatgaccccaaaagagttcaggaatcagtgaccctgaaatattctatggtcatagacttctaaaggcaaatggctttgacatttacagacaagagctaattgtccgaaatgacgacttttgctaccgtaaacaatttaatatttgatgatatatggtagcaaaatgttttaaaaaaatcttgctccttctttttataacaggagcgatacaggccaatgcccaggaaggaaagaaaagtgaattgcaacaatggaaagatttcattgagaatgcacgtttaatagccagacaggaacgacacttgatggattcgattgtccatataaaggccgaaaatgctttgcaaaggaaagagtttgtactggaaagtgacgaactgacactaaagcatggtgaacatggatatgtaaattctaccaccaacttcattgccttgcatgacgggagagcgaccgtgcaaatctcaccgttccaatcaggcggcggtcccaacggcgtgggtggtatcacagtggaaggcactccgaccggattgaaaatggaaacagacaagaaaggcatcacccgcctttccatgaatgtcaccggaaatggtatatcggcacaagttacagtgacactcagtccttcggacaaccgtgccacagcaacgattatccccaatttcaattctctcaatgttacattggacgggcaactggttccgttcaaggaaagttccgtatttaaaggaacaactttctgatcattaaacaaactaaccaagaaaagtatgacagctaaattgtacataggggtattcatgctcctggcaggaaccctatactcctgccaaaaagatgaagaagtgaataaactggatgccgactaccgcgtaatgactgattatgatccggaaacggatttcagtcagttccggtcatattatctggcagacagtattctgtttatcggacaagataagatattacaatatcttgacaaatcttgaacacctgtcaccataacatgcaggaacggggttacagtcgtgcagcaagcaaggagaaggccgacttgggattacaccagtacctaccattttgtgggatacaccgcttcaccttattggtggcggggattttccggttattggagtcctttttattgggagaacagagtttggaggtcgcaaccggctcgttggaggaaaattccaaaaacgtacaccaatacacaatgaaatacaaagggcggcttgaaaaaaccgaagagtttggaaacatggttatccggtcgttacccaacggagaagttctccggttaaaagatgtggcaaccattaagctgggtgcacaaaactatgttatcaacggacagatagacgggcatccggcagccacttgcatgatatttcaaacggcaggttccaatgccaatgaagtagtgggtgaaataaacgattatctcgaaattatagagaaggaacttccaaaagatgtcaaaattgcccatctgatgagtacaaaggattgggggatgcaagtatcctttaggctcactacgtatctataattttgtacatgtggatgtataactcgtacaaaagcgtgctttgtaccacagaaaaacactgctccactacacttcctacatcttgcaggtgctctgttttatggaagctgttggggctactgatttttatactgcttccagttcaaccgttccatttgatcaataaaaaaacgacttttaattatcatttatttgtgtggcaaaatcgaatctatacttcctcctgcttccaaagaggacttcatttcattgattaacaactcggaaaataaataagttataaataataattttgacttctttgtgtcttgcttgttattagttcccaatatatacccaacatttgggattagttggatctcaaaactactcctgtaaccgtcatactgttgtgaatacacaactcaatccgtctgctttcaattttttgcatacattactgtatttttgtattctgaagcaaagcgatgttttgattggaattcacggttttaatactcttgaccgaataaaatccgtttttcagataacgcgtacttatgagctctatatattaatccactggcacttttatccatcccgtaggatagatatccggggtttcggaatactgaaaccaacggctaggcacaattactgttttgtctatactaggatttaaccatgctccccaccagctgaatgtactgttgcagatgatgtgatgcttgcaatgactcataagcatcatatcctgccaactgtcttcacctgtattccaatcaatatataccgcattttgcaatggaagattttctcttacccaaacaatgtcatccgaaaaaatatagtaggacggagaggtaacccttttgctcatttccgctattgcgttttgatagtaaggtaactggcatacacttccagtagtagcccaatgtttgggttgcaaataatctccacgacgaatgtgtagagaaactgcgttttcatccttatccaaaatgtcaagcatatcaagacttctactgttggctttgcttctgtcaaaagtgaaagcttccctgacctcatcctttatatctgcaaagaaacgttccgactgataaaaccctttaaaataaagtaaaggccaaaagtatttcttttcaaaagcccttaaactattgggggcttgtttccgttcatatatttttttgaagaaaagaaattcgataatttttttcagaggctggtttatacaaaattctgtatggggcagcttgaatacacgatgcatttcatatccgtagtgcactttataatgcatcatgtccgaaaggtctatgcgcacctttggatagtactttttcatccgcaaataaaaagcataaataaacatttgatttcccaacccacctgtcacttttataagtctcatatttctttgtcatttttttgttatctgcaatatttcaatttgcatttcgacattgtttatgcataaattgaaaatgcaaaggtattgattttatcagagtctacaaatatcttaaaaaaatattgtaaatgtttacttggaaaatattgttttcccttatagcagtttactatctcgttattatatagtgaattaaccgtatgaaagatatgaagtaaaatttagaagaaaaatcagaagatattatgatatatcggttgtctttctgtggtacagcatgtaagtaatgtttttaatggaagtgagttacttcgtcaacggaataaaattttccaagtttactctcattagaattcttgcgatatttcttcaaaaatgtcgaattctgtcccccaaaaaaggtagagtgaatctctgaaagttttgtactttagctatattcttgttaggatatttctctctttcttgcttttaaattttatttacaaaaaacgcctaaaaacaaaaaagtaaactaatatggaactttaagtgtgagtttgttggctgattttacattgcttactgaatatttttgattagttttatctcatgccgtaccttttttcacttggtataaggtctttcatcaatgtttcgacaattttactgaatgattaaaattaaatattgtatatttatattgtcttggaatcgtatatttaatacaggccttaggtccctcttttaagtgacaagtttagttttatcaattatatatgatatctttgcaactttacatttcctactattaggaaatgtaaaaacatatcggatgatttatttattgaaacattgcaaaactatactatcaagatgggctggcacatttacaatatggcagtgacaagctgattaatttttatttgttaaacgaacaggaatataaatttgttattattgaatgcagcctcaggtagtgaaattgagcaggtactggaaaaaatggtagattttgggatggatgtaggtaaggatatatttgtcgctattctgatatatttaatcggtcgttttatcattaagcagatagtgtattgatgccaaagttcttgaaaaacggaagatagaaacgttgggtagctcaaagtgttaaactttatccgctgttcggtctgaccatgtccaattggatgtttgatatgcatgatctggatgttgactgggatggagaacatgttcatgttaatatgggggtaaccatagtgaattccgtatcggggttagtctcggagtcggggaggaactcgctttgggacgtaactggactatgaatgttgaattcggataccaattgattgatgattttgaccaaggaattattaatttcggaactgcataccagttctaaaaacatatcaagaagcagatcagttctatacactgtctgtctcttgaactttattaaaatcactatttctaggtatttcagaatctctttcaaaccttttactttgcagcaaacaaattaaatgatttgctgtatgaaaaaaatgggtataatttatggttcctctactggaacttgtgaaagcatcgcacagacaatagctgaaaaattaggtgcggcatcagttgatgtaattgatgcaagcaaaattaccacagaaaaagtgggaggttatgatatcttattattagggacttctacttggggggacggtgaattgcaagacgattggtatgatgctattaaaacggtgaagactgcagatctgaatggtaaaatcgttgctctctttggttgtggagattcagagtcctattgtgatacattttgtgacggtatgggagttatatatgaccagttaaagaattccggttgcacttttgtaggagcagttcctgccgatgagtattcatattcatcttcgatagcggtaatcgatggaaaatttgtaggtttggctcttgatgacgtgaacgaaagtggcaagaccgaagaacgtataaacaattggattgaagaaataaagaagaacttgtaattttgacaattgccttatgatagcttcagacattaacccggtagaattgaaagtatttctgaatcatatttatgaatttaaaaaaggagtacgtcagatggtactctatactaccaataggaagtatgaagattttgctgtaaaacggctgaccaatcaaaagattaattacataatccagcctgtggggaatgataagataaacctgtttttcggtagaaaagaatgcattaatgccattcgtttcctagtgactcagccactgaacaaactgtcacccgagcaggattttattcttggagctatgctggggtatgatatttgtgcacaatgcaaacgttattgcgaacgtaaagtacaataatctcaatttcacgtagttttaaatgtagtagtaaagggatgtctgaataattctcaggcatcctttttcactttttatgtgaaccatctttatatctattttgttgcattattagcataaaccttaaaaatgagaagatatggataaagaaaaaaagaaaaagatggaacaaaagaatgagctgacgaatagtggtcagcggtttcctgttgaacaagtgtccaatactggtaagcctaccaagaaacaggtgaaagcagcggtaaaagagttgaatccagatgtgaacagtttggggagtagagggtaatttaaagttggatacagtgatgggtataactgaacaaattgaagaggcgaaacggtcggattcattgttgctgctggtgttctatgcagattggtctcctcattatgaatggattgaaccgttggtacatgaatttgaaaagcgggttaacattgtgagagtcaatatagaagtcaatcggaaggtagccgatacttatgaaatagaaatagcccccagctttgtcctccaacgtaaggacaaggtattgtgggaaaaaacaggcaaactattcccgggagaattaagagatgtcattgaaatgtttaagagttgagatccatacatccgtatggattaaaaaagttccgttggtatgcagctacgggactttttttcttgtaggcggttttgtacaatgaaaaacatatcgtacctttgccaaacatttgattaaatattaaagaatatatgttcagaagtcatacttgcggagagctcagactttccgatgcaggcaaaagtgtaacgttggcaggttgggtacagcgtgcacgtaaaatgggagggatgacgtttgtcgatcttcgtgaccgttacggtattacccaattggtattcaacgaagcggtgaatgccgaactttgtgaacgtgccaatcacttggggcgtgaatttgttattcaaataaccggtgaagtgaacgaacgttcaaataagaatatgaatattcccacaggtgaaattgaaatcatcgtatcggaattgaatgtacttaattcagcggtaactcctcctttcacgatagaagataatagtgacggaggtgatgatatccgtatgaaattccgttatttggatttacgccgtaattgtgtgcgtaaaaatttggaactccgtcatagaatgacaatggaggtgcgtcgatatttggacagcaaagggtttctggaagtggaaactcctatgttggtaggttctactcctgaaggagctcgtgattttgttgttccttcacgtatgaacccgggacagttttatgcactaccgcagtctccgcaaacactgaagcaattgctgatggtttccggctttgatcgttactttcagattgtaaagtgtttccgtgatgaagatcttcgtgcagatcgtcagcctgagtttactcagatagactgtgagatgagctttgttgaacaagaagatattatttccactttcgaaggaatggcaaaacatttgttcaaggagttacgtggagtcgaactgagcgaaccgtttctgcgtatgacatgggcagatgccatgaaatattatggtagtgacaaaccagatttgcgtttcggcatgaagtttgtggagttgatggatatcatgaaaggtcatggtttctctgtttttgatgatgcagcatatattggtggtatctgtgcggaaggggctgcaagttatacccgtaaacagttagaccaattaaccgaatttgtcaagagacctcagatcggtgcgaaaggtatggtttacgcccgtgtggaagctgatggcaatgtaaaatccagtgtagacaaattctattcacaggaagtccttcagcagatgaaggaagcgttcggtgccaagccgggtgacttgatcctgattctgagcggtcctgatgccatgaagactcgcaagcagttatgcgaacttcgtctggaagtgggacgtcagctgggactacgtgacaagaatgaatttgcttgtctgtgggtagttgatttcccgatgtttgagtggagtgaagaagaaggccgtctgatggccatgcaccatccgttcactcatccgaaagaagaagatattcctttgttggatacagatccggctgctgttcgtgccgatgcttacgatatggtagtaaatggtgtggaagtaggaggcggttcaattcgtatccatgattcacaattacaggccaagatgtttgagattttgggttttactccggaaagagcacaggaacaattcggcttcctgatgaatgcattcaaatacggagcacctcctcatggtggtttggcatatggccttgatcgctgggtttctttgtttgcaggacttgatagtattcgtgactgcatagcattccctaaaaacaatagtgggcgcgatgtgatgttggatgctcccgctgctttggatcaatcacaattggatgagttgaatctggtcgttgatataaaagaggaaaagtaagttttgtctgcttttatagagtcttgtataaaagaccgataacgggggatccgaacatagcgtagcgaatactgtttcagctaattcgttacgctttatctttttgatttaaagtagtccgataagctgaaacagattacaaacaaatgaaggaagcatataaaaatcaagcgtatgaaagagaaaaatacgatcaagataaagcgttataaatcaccctgcggagtgttgctgctcggttcgtttggcgaaaaactctgcctgtgtgactggcaggtggaaaaacactgcgatcgtgtgaaccaacggttgaagcggatattgtgtgccgaatttgaaataagtacgtcagaaataatcgaagaagcaatagagcaactcaacgagtattttgcaggacaacgcaaagaatttaatgtgccgcttctttttgtgggcacggattttcagaaaacagtatggaatgaactgctaaagataccgttcggcaaaacaatttcttacggtgaaatggccaagcatatcgggaggccccaagcagttcgtgcggtagccaatgctaatggtgcaaattccatatcaatctttgcaccttgccatcgtgtgatcggtagtgaccactcgctgacgggatatggaggcggactgtccgctaaaaagtttttattggaattggaatcacaacctcggttaatgttatgaacagacaagaaacatttccaatgctgtaataataaataaaaaggaatggatgatgaaaatgcccattcctttttatcatatcttcttaatgaattaccatgttgttccttggaatacactactttcgttataaggaaccagatacccgttcattgtcagcgtgttgcccgagaaatttggatttatagtaacactagcctgattggttccgccagtcagtacaatggaaacggtggccgaaacggcaataccattaattccataattatagtacacattaccgtctttatcctggcgcatacttattccgttcacatttccctgaaccgtgacacctcccaagccgttcgggctccagttatacacaaaattagtaaaggcggtctgaataataccttgcccatcgtttacttccacataattcgtgttagaggaaacaaaacgcattattccattacggaatacaacgttatcagcttctaatacaaaagaaccgttttttaaagcattaattgcttggacgtaggatacagagtcctgctgagcttccaaggctttcttttcctgacgttctttcttccatgcttcacgtttagcgtcttctctttgttttctggtttgtgcatttgttactccgctgaagcaaacgagtaacaatgcggctaaaaataatacttttttcataattaagctgtttagtaaatcaataatatcttttgaatattctgataactaaaacagctttaaccatgaattgtttaacgaatatgtgaatttatataacgataacgtttgtatttaatctataaagcgtcgggttagattttcaaacttatcaatacgccggtcacggagaaaaggccaccagcgacgaacattctcgctacgggtcatatccagttccactaccatattttcttcatccatattgctggcttgtaccagtatttctccttgaggacctgccacgaagctattaccccaaaattggataccatttgtctgaccggaaggatcgggctcatgtcctacgcggttcacggcgataaccggcagaccgtttgccacggcatggccacgctgcacagttacccatgcatctagttgccggattttctcttcttgagtgtctgtgctttcccaacctatagctgtaggatatataagaatttcagcacctttcagtgccatcagccgtgcaccttcgggataccattggtcccagcagacttgtacacctagttttcccagtgacgtctgaatgggttcaaatcctaggtcaccgggagtaaaataaaatttctcataataagcgggatcatcgggaatatgcattttgcggtattttcctgctatactgccatctttgtcaaaaacgacggctgtattgtgatacagtcccggagcacgcttctcgaataacgaagtaaccagtacaatgccgtatccggcagccaactcactgtagaaaccggtagaaggaccgggaaccggttctgccaaatcaaacatatccgtatcttctgtctgacagaagtaagaggtgttgtgcaactcttgcaatacaaccagctgtgcacctgccgccgccacctgttctatattgcgatgcagtttgctcaaattatgacggatatcatttgtgcatgtctgttggataattcctattttaatcgttcttttcatacatatatttattaatatacaccttcgggatattgcatggtgacgcaatgcaacgagccatgttgctttatcaaagcagtgcagtcaatacctactatttctcttccgggaaatgcttccgccaatacttctttagcgcgcacatcatttacaaaatcagcataagtaggatagagtacagcttcattcattatcaggaaattggcataagttgccggcaagcgatgatgttcctcatcataaacagcactcgccataggcagcggaagcaggcggtatggcctgccgttcaaagtacggaacgcttttagttcttcttccatcattgccagttccttatagtgttcatctttttcattggtgcactttacatacacaatggtatcatccggacagaaacgtgccaatgtgtccacatggctgtctgtatcatcacctgccagataaccatgtttcaaccataggacctgttttaagttgaatgtttcttttagaaaatcctccacttcctgtcggttcatttcatttctgtttttagccagcaagcattgctctgtagtcagcaggcttcctttcccatcactttctatggaacctccttctaaaataaaattccggcagaaaacatattcacctttcagaacaggatggtgaaaatatagttcgttattaatctggttatcataatttgcggcaaacttcattccccaaccattaaaacagaaatccagtagtaggggagtagcgtcttctttcaacaaggtgataaaagcatgatcgcgtgcccaagtatcgtttgtgttgatttttgatgtgatgagtttttggatatcagctccataattatctatactatttcttatggaatcggggtctggagccacaatcaacaaattctgacgtttcaaaacctcataagctatcttaagaaaacaggtattcacttcttccaacatgcatgcccagtctgtgtctttatggggccacgttagttgaatcaaactttgtttatgccattcggcaggtaaataggacatattcatatttttaaatttacttcgcaaagatatgaaataaactttataggttgattagtcatcgcttcgtttttgtaacgaacctttccttcttttccatatgaaccagcggaacagttcgtcccaagtattgaaatcttttttatacatgagacctactccttgagtggtcagggtagatttagtaaaatagcggtcattagtctgattatatcctctcaaacggaaatctccgttttttgtcaataaccatatcgcttcaaagtctcctacgaaattgctatttgccatcacattctccttatagccgaagtttccatttatcatcagcctgttattcaataacctgccggacaacatagcttctgcttccacatctgtccaacctttttcaccggtactcaggttggcgcctatgttccagtttttattgcccatccattgggacaacatattgttcagctgaccggaaagtgtactgaaggctaaagaactggttgcattagaggattggtcattattggcataatcataggtgtagaacttaccaattcccagcaaataaataatctgtgtattcatttgttcttccgtactggtagcactacgtaccaattcccggtcttcctcgcttacagtgggcagttccaaatcgaatttaatatccggattggataaatttccagtcagattcatcagacagtttaccttcaccgtaccttggttgcgcgagggatctactaccaaatcacttaaagaagcagaattaaccgtgtataccgcctgtaaatcaagattcgcctgataagggtcacctgagaaagtcaccgtgccacctgatttcaaggtaaagtccttgcgtattacttcctgcatgcttagtttatacataccttgatctatgacatagctaccgaacatacggaaatcacctttattgaaaaaattcacttgcagatttccatttccggttgctgtaatattatctcccgctacaggatccatgataattttcatggtagcgttgggagttgcttctatcaacatattgatgcggagatccataggaggtccgtcttcctctttagtcttacgcacattagagtggtggtaaagatcggtttccacatcatcgtgaatgcgcttgggagttttgtctacaaaagtaataaactggttgctcgctgcttccgtggtcactccggttatataagtgaagctggtattgctgcctgtagtcagtgaagcgtccactgtcatcgcattatttccaccatccagcaccacatttcctgtaccatatacttttccgtaaaaaggcatattcccggcttcgtaggtattgtacatcaacaggttgttgcctcgtatattgaaatggtacattagatttttcagctttgtgtgatgcagataaccatttaccagtccgtcatgtccctcacggtcatagacttttacattcctgaaatccagactgcccgaagatatatgtatggagtcatcccggatttggaaataggtgttcaacacatcaattttagcatccattttggcccgcacttcaccttccagatccaaatgcttgaaatcaccatataaacggacattcccgttgacacgaccatttatttcactgaaaattccttctataaaaggttgtaagaatcccagattcgtactatctgcccgaatcaacaggtcaagaccttttaacttgggagagacataccctgtcacatgagtggaggaaattcctttttccgctatttgggcatccagtcgtactccgcccaattccttatcccatacacctgtaatatcggcttctcctaataaagaacggttcagacagaaattgtgcacatttagacgggttcgcatcacggggttcttcataacacttttcaaatgaacctttccagttacaagtccgccaaactctacatcgtcaaactgcacgatatccagtacatagtccagcttgatatttctcaaatccacccggcaggaatcactttctttcttggtcagtttaccatctatccttaaatattggtcttcatgttcaaacaggaaattattaatgaatacgcgtcccgaatctatggcgatatgcgaaggatgaatgttccataccgtatcatttagcactacttttgtgggctgtatgtttatatctgcctgaagaataggatgggggccttccgttttgaagaaacgggtatcggcggcaaatttaccaccgtaagtcacatcagtattgtttccccagttaattgttgtttccaaatgatcgtttttagcattggcttccactgagaagttaagcattgcaccacttttcattaacataccgcctcgcagtgagcatttgaaccggtcggaaggattctcacaaaataaaacgcctgaatcataacgtgttccattgtatctgaattccggaaaatgtccttctacgtgcaacttctcctcgccatcgttaaaatatccttttaaagatgccggcaaatataattccaatggaatctgaaataatttggatagcacttcggtattctccaggcagatatcaaactggaagttattatgaggctcgggcatattatcctttattgtcagtaaggacggaatatagcgttgtaccgtctttaccacgctggccggaatggtgtggtaggaatagtcaccgcgtatcactgctgtcatgaaggatgaatttatgcgcaactctttttcaccgcttacctgtccggctgtaatagtcagattgtcaagaaaacaccctctttcatcgggagcgtttaattgcaggctgtccaatgaaatacgcccgttcatgtcgtcaatggatttgccggtgaaatcggccgtgagtcccagcgatatactggcattctcatatttgtccgacaaatggaggtcgtgggggcgcaggttctttacggatgccttcagattaaagtcagggattgttttggcaacattgaaattaccgtctatctggacagaaccgtttgcgtcgtccatggacaagcgcccgttaaagcctccatccttatatacgccatccaacatgatattttcatattgatattgactatattcaaaagaagatatgattcctttgatgtatgactccggataccggttcttatagttgaaacctttcagttccacattgaaatccaccttgccgaatttcttttcctgattaagtaattttcccaaatccaggtcagcacttgctacactacccgaataggttctgctcatgctttgttcatcaatgctcatcatcacgtccgttttcaccatgcctgcccctgtatagaacaagcctgtcagtgtgagatcatgcagatagcccgccgcttccccgttaaaacgaatatagtccaaacgttgcaaaatgggaggaacctttcccgtcaggttcgtcatcagaacgtttatgccctctttcgtcatgatcaggttacccagtttgccgtaaatgtacatatccatgcctgcatcccagttactcagggccgcttcccctgcaatcatcaatccgtggtggttagccagctgcagggtggggcagtccaaatgcttgccgtgaccggagaaaacaagatttagatccaacggttcttcaaaacgtgacaaggcaggcacaaaaggagccaaatctttcagtataactgaagccttcaaagagccatcgtatcttacattttctgtcatttggggcaattcgggcaggctgtcatacttcaaggtcagactatctatctttaaagcggtatttgaaagttccacaccaaaatccttaatatccaaacgtttattgttggctgtaactttcatggcaaatttctgcaatgaaaaaccacattgttcgtcaaagctgacccgccggatggcagcattcaacgagtcgctgcgcaatgctttcagtgaaagcgtcgcagcgagattttttaccgatagatgatgggcattgaactttccgggagtttccggttccgataatatatcgtatgtcactctgccacgccttatcaacacggaattaattcgtaaatccaaattagattttgttttaaccgtatctttggatgcgaaagcgtctaacacaaactggaaattaggggcagattctggagtttcccggttcaaattgaccgtaaatccaaaaagctggacactgctgatggtgactttaccgttcagtaaaggaagaagatcgaattttgccgacaagcgggctactttcagcatctcctgattcttccggtcatgcaaaaggacatcttccacaatgatgcggttcagcaaacccatatcaatccgtcctatagaaacctccgtattcagtatgttttttaattctttagttacaaaaacagataatttgccctgaacatacggtatgttcagcagcacaattattcccaggtagacaccaatcagtgtacctagcagaatacgcacagtgtacttaagactcttactagaaatcattgtttattttgggctaacaaaaatacgaataacgtacgacgtagcccaaaataaacgattttttttacttgtttttatgcaatcttttcaactcgaaggagaaaatgacacggaaacatccgataataaggaaagtgatggacagcatgtagagcacggtgacagcgccaagtccgggttgccagatgatagccatagagcaaagaatggccagaatgccaaacaccagataccatccccagtccttcgtgccatagcgtttcaaatctgtggaatagccacacaatgtaaaccctctgaacatcaaccaaaaagcgacaataaacggaatcagctccatgctgaccaacggatagaataccagataaatacctatcagtaaatcaataatacctccggcaagataccatccccaactgctgattgtttttttgtttccggcagcaaaaaagatttccagaatgccactgaccagaatcgagatactgaagatgacactcagtgccacataactgctcacaggagcgaacaataaacatagtgctaccgcaatgtagagcaagcccagcaacagggacatccaccaattttttacagcgtagcctaagccaccaactaattcattcatatttgttaagttttaggttataatttgaactaataacgtcccctttgcaaaaaggtttacctacaaatacaaaaaaagtctttaaataccgccgattgacttttagaactcaaaaaatattccgaactttgcacgctgaaaactaaattgatagttctatttacattttgaataaaaaatgaataaaaaaagaatgaaagataacaaaatcccttcaccgttagtatcccttttacccgtattcgtacttattttattattgtttgtcactatccgtacatttggaagcgatgccttgtccggtggcagccaagtctgtctgttagtggctacagcagtttgtgtgctgacaggtatggcgggattccatcgtccatggaaggacttcgaactggctatcaccaataatatagccggggtaagtaccgcacttattatcttgctgatcatcggagctttgtccggagcatggatggtcagcggtgtagtccctacattaatatattacggcatacaggttattcatcctcattttttcctggtatccacttgcattatttgtgcggtagtatctgtcatgacaggcagctcatggactaccatcgccactatcggcatcgcactgatgggaatagggaaggcgcaaggtttcagtgaaggttggattgcaggtgcgattatctccggagcctatttcggtgataaagtttctccgctttcggataccaccattctggcatcttccgtaacggatacaccgctgttcactcacatccgttacttaatgattaccaccgttccgtcacttgtcatcactttgataatctttaccatagctggattgtcacatgaagccactgataccggtcatatcgccgaatacacccgtatattgagtgataagttccatatttcatggtggttgatgattgtccccgttgtcacagcgatactgattgcacgtaaagtgccttccatcatcactctatttgtttctacggctctggctaccgtctttgccttgattttccagcccggactattatgcgaaatcgccggacaaggagccgaagggattgccgccttgttcaaaggaggaatgggaatgctttatggtggaacccaattggaaaccggtaatgcggaaataaacgaactgatatccactcgcggaatggcaggtatgatgaataccatctggttgattatctgcgccatgtgtttcggaggggcgatgacagccggaggaatgctcggcagtatcacttctgtctttgtacgttttacgaaaaagcgggtaggaatggtgtcatccacagttgcatcgggcttgttcctgaatcttgctacagcagatcaatatatatccattatcctgacgggtaatatgtttaaagacatctatagtgcaaacggttatgaaagcaaactgctgagccgcacgacggaagattctgttacagtcacttcgccattgataccctggaatacatgcggtatgacacaggctactatccttagtgttcccaccattgtgtatctgccttacgccttctttaacattatcagtcccttgatgagtatcacaattgccatactgggatataagataaagaaaaaagcagaacagccgggcctgtcataataatgataggatctgatgattatatatctttcacgtgaaagattagcagggttcaaaaataacttgtacatttacccaccctaataaatcattttatatttttacaataatatgaagaaacacatcacattcgctcttctgtttgcggctgcattgacagcccaggcacagcagggaggcatttcaggtgaaatgctgaatcaaatcaaacaaagttataaggcaacccctgccgacaaagccatccgtaacgccttaggcggaacaagtatcaacacgttggcattgaaccaagagaaccgtgccgattttgatacggaattttcacacaaggtgctatccaaggggataaccgaccaacaatcttccggtcgttgctggctttttaccggactgaacgtgctccgcagccagatgattgccaaatacggactggatgagatggagttctcacagaactattgttttttctacgaccaattagaaaaagcaaacttattcttacagggaatcattgataccagtggaaagcccatggacgacaaaatggtggaatggctgttcaagcatcctttaagcgatggaggacaattcacaggagtttcggatattatagagaaatacggactggtccccaagagtgcaatggtggaaactttcagcagtgagaataccggaaagatgagtaacctgataggattaaaactgaaggaatttggtttacaactacgagaagctgccgctgccggagtgaagccggtcgaactggaaaagaaaaagacagaaatgctgggaacggtttatcgtatgctggtgttgacccttggcgaacctgtttccacctttacatggagtctgaagggtggagaagcgaaagaatacactccgatatctttctatagagagttcttgggaaatgatctgaccaacaactacgtgatgctgatgaatgatcccagccgcgaattctataaatgctatgaaatagactttgaccgtcaccgttatgatggcaaaaactggacctacgtcaatctgcctatagaagatatcaaagaaatagccattgcttccatcaaggacagtaccatgatgtacttttcttgcgatgtaggcaagttcctcgacagcaaacgtggcctgttagatcctgataattatgattacgaatcattgatgggaaccaccttcggcatggacaagaaacaacgtatccaaactttctccagtggcagcagccatgctatgaccttgatggcggtggacttggataaagcgggaaaatcgaaaaaatggatggtggaaaacagttggggcagtgccagtggatacagaggacaccttatcatgacagataagtggtttgatgaatatatgttccgtgtagtggcagaaaagaaatatgttcctgccaaggtactggatattttaaaacagaaacctatccgtcttccggcatgggacccgatgtttgctgacgaagaataagcgtcatctctttacattgtatataatttaagcggactgtacagaaaagaaagactgtacagtccgttttttgttctaaggcattgtgtatgtctgccatttttacttctttttaacttctctcttgtaaaaagaaacataatagggaaaataggtttgttgcagtgatgagttattgtataatgggcttgcagaaaggtgtttcttgcatatttaggtataataaaaaatgggaatctcttcgtaagagaaccccatttttgtgcaaatatagcccatatttgctttaaacgcaattttttgttctagaaaaataagaaaaagttgcaaacaggcgcatctcgtttataaaaacagcatacgacaaaaccagtaaatattcaattatcagagatctaacttgactttggggttctcttacgaagagaaccccaaaatatagaggatatctgatagcaaatctgttcctctttttcaaataaaggtatgataaaatgtaatgttttgatgggaacaacgaatgataatcaagacataacgagcgaagcgcctaagttactgctctgcagttcaatcgcttctgcttcagacccggggtcaaatgcagtaaccaagccacaggctggaatagggaaagaacaccctgaactctcgtggtactatatgtatctttcctataaggaactgaagcgttatattgcagtcttcagtggcagaaaagcagtaaagctccgtacttcggaagggataaccgaggaatgttacttctgtttcaaagtattttcttataccgaggcaggtcatcggaaacgtttcgaacagtgtgattatactaaacaagagtatgctgctcgccgtgaatccgccagaatcgtgaaggaagccttttccaccggttctgcctcacaactcaatgccctgacagatgaaaaggaagtacaaagtagcggttggttatttgtgtgcgctcctttggagcaacttcagcgcatcttgtctgccatgctcccccgccaatatctggtaacggactacgttacccatcgtgctgcggtcattccccagtgtcagatggaggaattcatctatctatatgaatccatgccctacaacattgaactgttgaaccgtcctttggaggcttatcttcagaagaagcaacgtattcgcattaccggtggtatttttcatggtaaggaggggtgcattatgcggctgcatcgcaatacaaggttagtgttcgcttttggaaatatgacggtggctatcagctatcttcatgcttttccgttcgagaaagtggactagtttttataaatctatctcttatttcaataatagaatatataccaattagtatgagtaagaaagaagaactgaagcgacaaatacttcagttgacacgtgaatattataacgaagttcataaaacttcaaaagtgtttgagccgggcaaaagctttgttaattatggcggccgttacttcaatgatgaagaaatggtaaacctcgttgactcgtcactcgatttctggctcactgccggtccttgggcccataagttcgaaacccgtctggcaaaatggctgggggtaaaacattgtgcgcttaccaactccggttccagtgccaacctattggcattctatacactgacttcccccaaattaggagacaagagaataaagaaaggtgatgaagtaatcacagtcgcttgcggctttcctaccacggtaactcctattatacaatatggtgcggttcctgtttttgtggatatcacgattccagagtacgatattgacgtcacccggctggaagaagccttttcagacaagacaaaggccgtaatgatcgcccattcattgggaaatcctttcaatcttgaagcagtcaaagcattctgtgacaaacacggactatggctggtagaagacaattgtgacgccttaggatctgaatataccattgacggagtgacgaaaaagacaggtacatggggacatatcggaaccagttcgttctatcctccccaccacatgaccatgggcgagggcggtgcagtctatacagatgacgccgaactagacaagatagtccgttctttccgtgactgggggcgcgactgctggtgcataggcggtgtggataatacatgcaaatgccgtttcacaggcaagtttggtgaactgcctgcaggttacgaccacaaatatgtatatagccattttggctttaatctgaaagtgacggatatgcaggcggctatcggttgcgcccagcttgagaaactggattatatcgtagaagcccgtcgtcgcaatttcaagatactgcgtgaaggactggagggaaccgaaggcctgatacttcccgaaccgataaaaaactccgatcccagttggtttggcttcctcatatcagtaaaatccgatgccggttttacccgtaaccagcttagtgaatatctggaaagcaagaaaatccagacccgtaatctctttgccggcaatctggtgaaacatcctgcattcgatgagatgcgctctaccggcaaaggtttccgcattgtcggtgaattgaaaaatacagactttgtgatgaccaataccttctggatcggtgtctatccgggcatgacggaagaaatgctgcaatacatgatctccaccatcaaggagtttgtagcttctcataagtaaaaatcaaaataaacaagacatgaaagcggtactatttgccggtggtttcggtacacgtctgagcgaagccaccaatctgatacccaaaccgatggttgaaatcggaggaaagcccatcctgtggcatatcatgaaaacttacagccactacggtatcaatgaattcgtcatctgctgcggctacaaacaatatgtcatcaaagaatattttgccaactatttccgtcataattgcgatatgacggtagatttatccaacaatacggtgaatatacacgacaaccattcggagaactggaaagtcaccatggtagataccgggctacatacccagaccggaggccgcctgaaacgcatacagaaatatatcggcaacgagcgttttctgctgacctacggagacggcgtttccgatatcaatatagcggaaagcatcaaagcacatgaagcctccggttgtgccgtttcactgacagcctacaagccgggtggcaagttcggagccctgcagatcgatctggaaagtgacaaggtcttgtcctttcaggagaaaccggacggtgaccgcaactggatcaatgccggctatttcgtgtgcgagccggaagtgttcgactatataccggaaaatgatgacacggtgatatttgagcgcaagcctctggaacaattggcaaaagacggtaagatgcacgcctaccgccatacaggattctggaagccgatggataccctgcgagacaatacggaactgaatgagatgtgggacaaaggaactgctccttggaaagtttggtgacaaagtcgtggattgtttgtataatcaaaaataaatagcgttatttgcagaaacaaaagatacagaatggacaaggaaaagaacatagcggaagaaatcaagaccaaggacgatataaaaaagttctttcggagaatgattgaagacaagcaggcggttgctgattgtatccgtgcgggtcgtcctttgtccgatttgaaagaccggggtattaaaatagcaaagttgaccgatgtcctcagctaactgctgcccggctgatgctatattctttagtccatatcaatgagacatctccttatgaagtttttgcatacaaagaagacaccgtctatttcataacagatgacggcagtgaatatcttgtcggtttcattgaagaaacaaatataggaattcagcgtgcctatcagttgtttattataaaaaaaagaaacggaatacatatcggtacggatgtgaagatcgggcggacagtttcatccatcgttcattcatttaaggggggtaaaacgaaatgcgataaattgagttattccacataaacggaatagctttgatatacaaatagttatgattgaataggagaggagagagggaaaaacgaaaagtttactctgctttactttggctttactttagactttactctgaatagtttgaacgcctatctgctttacactgcagcgaaaacttaatatacggtggagtaggagaggagaggggtgagcacattggccgcagaacgcttttatttaagcggattgcggcttttttatgctctgttgataggattatcatttcatattaaaatagcctgaattcggcgttcaaaatagcggaaataggagaggggcaaatggtattcatttgagggtggaatattgcgttttttaggggttggttgtgcatttggttgtgcgtttggttgtgcatttttgtaataaaaaaaacgaaatgtttttaatggttgtgcatttggttgtgcatttcccgttaaaaatagacgtgtttagatatagaaattgcctatttattagctgttttatagttgttttgtggttttcagagggggaaaataccataaaaaaataatagaaatcagcatatattgttgtttaatatgctgatatacaatataatgaataactgattcttatttgataaaaatcaaaagtgcgtgtgcagctaatatttgggacactttttcccgaaaattatacgacatctgcacatattgcatcgggtgcagccgattgttgtgtacccaataactttacttgttcttttaatttgccgatttcctctgcttgttctgcgattttctctataaagtagtgggtgttttggtcgggaggtgtgtattgcgtctgagaggtagaattatacagcatctcccctctttccattaataaccactctgctgatatattcgcatttgcgcatactttttcgaggacatcataagatggcttaccttgcctcgtacctacaacattctcaatcacagtagcagatacacctattgcgttggcaaaagctcgtttgtttccgccgtacaattctttgataatatggttcattcgttcatttatagtcatacctctcctattttatttgcgcaaaagcgaataaaatattcgcaattacttgttttattcgcaaatgcgaattatatttgcagcacgataacaatgtaaacggctgtaaaagtacaaaaagcggttgatattgcaatgaataactaataaaaacagaattatgcaagcaattaaggtacaaatctatttttcggaatgggaaaaagtaagtgattttatttctgaaataaatatagatgaagaaatggcggcttacgctattgataacagaactatggtgatagcgacagttggagagtgttctatggcctatgcaaaggcacagctgaaaacttggtttagtgatcctactattgaaaccattaaataagaaaaacatgaaaaagagaattgtagttgagtacgggaaaatatcccaaatctcaaaagattttaaggtgacgaggcaggccgtttataaggcattgaattatttgagtaatagttctaaggctacattaatccgaaaggtagccattgaacgtggaggcgttgaaatcggtgatcaaaaggaaacggcatgaaaaggatgtttttgctccttttgggagatgagtttaaagagtatttctctttgactacaaagcaaaagttttatgtgtggtatttctgcttgagtttctgttttttgtgtataacagatgatagtccgatttgggcgattatagtggtggttttgaattttgctaatgccgcccgtctgattaaaaaagtaccaatttcaaccgatgacaaagatatttaaaataggtgaatcccggacggtcttttgaggtggttcgattccgcctccggggactaagattttaaaataatggagtatttcaataaaatagtatgcgtaacagttcaggaattaaccagctctgaaaatggagaaccggtgatttcattatggacgctttattctttaattcggagaggtaaggctcaacgggttaatagaggcggtggtcttgataattacgctcttattgattacttgtccttacctgaacgttaccggatccgctttgagcaaaagtatggggatccggtggagttaatcaaagagaagtgtatgaaaaacaggcttaaaatagatgaagcagcccggatattctttgaggattaccggtatgataaggccggggagttagtaagtctcacagaacccaaaaaagctgaatataccatcaacgcctcagtactgaacgagttgatatcgatcctgaatgaccgggagggctatcgcaaggctttgggtggaagtacaaagaaagtatgggaaacgattatcggaacggcagaccgcctccgtgactcttatggccatacgctacctgaaaacgccgcccggctgaaagacaaaataaaccaatacaaaaaagagggttactcctgcttgatcagcaagaaaatgggaaatggcaataccctgaaaataaccgaggaagccggtaacatgattatagcgttaaagcggagcagcgttcccgtttatacagatgctcaaatattcgtggaattcaaccggattgcagatgagaaaggttggaagcagctccggagcattcagagcctccggcaattcctgaaccgtcctgacatcgaaccgttatggtacgatgccgttcacggggagctgaaagctcaccagcgttacagccgcaagaataaaaccgagcttccctcgatgcgtgactccttgtggtatggtgatggtacgaaaatcaatttgtactataaagactatgacaaggacggtaagctggtggttcgtaccactcaggtttacgaggtcatcgatgcttattcggaggtatttttgggataccatatttcagacagcgaggactacgaggcgcaatataatgcctaccgcatggccattcaggtatcaggtcataagccttacgagctggtgcatgataatcagggaggccacaagaaactgcagaatagccatttctttgataagattgtcggccatgttcatagaaccacggctccatacagcgggcaatccaaaacgatagagagcgttttcggacgttttcaggctgaggttctgcataaggattggaggttcaccggtcaaaatatcaccaccaaaaaggacacgagccgcccgaatttagagcgtatcgaggcgaacaaggataaactttacactttggccgaactgaaagcagcatacgctgccgcccggaaagaatggaacgaaagcaagcattttgctaccggggtgaaccgcatcgagatgtaccaaaatagcgtgaaccctgataccccgacagtgggtgttctcgacatgatcgagatgttttgggtgatgactgataaaccctccacttacacagataacggtctgaaaataaccattaaaaaacgtgagtttacatacgaggtttacgaggttccgggtgttcccgaccatgaattcctaagaaaaaacagagggcaaaagttctacaccatgtacgatccttatgaccatacttcggtatggctatacaagaaagataaagccggagagctgcgatttgtacgaactgcagagccttatatcgtcatccaccggaatattcaggaacagaccgagggcgaaatgtcctttatccgccggaatatagaggcgaacacggaggatcgcatcgagcgtcaggttgatgcacgtatcatcgagcaggcgcacggcgtgagtatggaacaacagggactcaaacgtccgaaattgaaaggtgcaaagagcgaaacggagcgtgaaattgaacgccgagtccgccggtacagtcaggatccggaacagctctccgccggtaaggtgacaaagctaataagcaacatcacgtttgaccagctgaatggtgacatccgcctgaatgaaaagaaagtagcaggaaaattataattctaaataaaatgaacagtacaatgacacagcaagagaaagacagtatccgtgaagctctccgggtatatgcagcaaagtattccagccaaaaaaaggctgcggcaagtttgaacggcgtatctgccgggacattgagtgccgtggttaacggcaagtatgagagtatcagtgatgatatgttccgcaatatcatctctcagataacccctgcagctgcggccaccggttggcagctcgtggaaacgaactcctttcaggagatatggtatgccctgagcgatgcgcaggaatttaaaaaagtccgctggatcgtgggtggtgcgggatgtggcaaaacaacgacagccaccatgtacgcacaaaagaatcatgaggtgttcgtcatcctttgtgatgaggatatgcggaaaggtgattttgttcgggagatcgcccgtaaactcggttttaagacttgcgggatgcgtatccgtgaaatattggacttggccatcgagagcatcatacagatggaaaatccacttttggtgttcgatgagggtgataagttgaatgataacgtgtttcactactttatcaacctgtataaccggctggagggcaaatgcgggattactttcttatccaccgattacatccagcatcgtattgactgcggtttgaaccacaaccggaaaggctataacgagatttattcccgcattgggcgtaagttctttgagctggaaccaacctcccataatgatgtatttgccatttgccaagccaacggactgatggataaaaaacttattgcaaacgtgatcgatgtgacggaaaaatcggagtttgatttgcgatgcgtgaaagatgccattcaccgggagaaaaaggtggcggcagcgaaatagtataaaaccctgttcaaacgctggttgaacggcgtttgaacgtaattcaaaaaatatatgagcaaaattgaagaagtctttagaggtttaggaagaacagagaaagcgaaatttatttcgcaaaatattgattacgcaaatgcggatgcaatagccgagtatgtaagtgcctaccttttcgatgtccttaaagatgtcggaaacgatgaatatgtagcaacgtaccttaaagaaaaaggttacaaagtgacaaaggagtaacaattcaaatgagaatatatatgaaacaaattgttttaccactcgcaagccggtttccggtaggccattttaaaagaggccaactcaccggctttcctgagaaagtaattaaaggaaccaagatccacacgtttcgtgaggatccgggcaaatgggcgtacaacgtggagcttatcaactcccataatgcggagctatctatccgccggtggattggccgtccttatcacactccgcagctggaggtgaaaagattgaagaaaatcggtatccagcaggtgcaaatgacatgggactccgatatcgagcagccgaccgttttcatagacggaaaacgtatcctaaacgtggagcagctggctgctaatgacgggatgactctcgatgatttcgtgagctggttttttaagacctccaacacattcgagggagtgattattcattttacagatttcagatattgatttatggcacgggcattatcggtaacagaagcagtaagcatgaagaaagaaacgctcaagctgacaggcgcatgggcggacgctttcggagagcctgaacggattggcgtttggtttatttggggcaatagtggtaacgggaaaagcagctttgtcatgcagctttgtaaagagctggcaaagtttgggcgggtggcttatgacagcctcgaagagggtgcgagcctcaccatgcagaacacgctccgccgtttcaacatggccgaggtaaaccgccgtttccagctgcttgactgtgagccgatgtccgagcttggtgaaagaatggataagcataaaagccccgatttttacgtcattgacagtttccaatacacccaaatgagctataaagaatacatcaaatttaaggaggcgcaccggaacaagctgctgatttttatcagccatgcagatggccggaaccctgatggtcggagcgcaaagaaagtgatgtatgatgccgccctgaaaatttacgtggaggggtttcgggctttctcgaaaggccgctttttcggctccgtggggcattttacaatttgggatgagggtgcggtaagatattggggagataacgcttaaaacgaacggaaatgagtaaaaataatcaagttataacgatttcgcctcccatgtttatcggggagggaaatcagaaagaaagtatctccagcaaaggccaccggtgtagctattgccacggtaacggtttcttttggggagaggaacaacgggaacgggtgaaagttgattgcccggtctgcaaaggtagcggtaaactcgatgccgtgataactatcgagtggaaacctgcaaaatagaatgaacgatggaaaaagaagtacctgaaaatatattggcgaaaattagaaagctgctccggttaaaagaatccgccataaaaatcggatccgagggagaagcccatgcagctgcggaggctgtaaaccggctgctgacatcctataacttgtcattgatggatgttaccccggaagaacaaaagaatatgatatccgtgactgaatcggagaaaataacctatcaggacacgtatgggaatatttggaaaagggatttgttgcggattatatgcgagtataatttttgccggattttgttgcatggaggtacgacttacatggtggtagtcggtacacgggaaaatgcggaagttgtgctctcgctttataattacttgaggtctgtattccgccggttgtcggtagaacgttgcaccgagtatgtggctacccgcagagggtattaccggacaaagaagtttaaacggaattatataaaatcttatttgttgggatgttgcaccggtttgcggaaacaatttgagagcattcggaaaacagcggaggaaaccggactgatgctgtgtcacaaccatttgattgatgattattttcaatcgataggcacaaccacccataaatccaagaaccggaataaagtgaacacttccgcctattgttccgggtacgatgacggttcaaagatcaatttaaacaagcaaatcaatgggaaatgatctttatcaaataggcttaccggtggcctctttaagtacagtccttatgaattggacttgctttaaccgaccggagaaattgctgatcagcccggccaagaaagatgattgggcggtggttgaactccggaacccggagctggccgcagctatcatcaaggatgtgccggaggcaatggtaaaagtagtacaacaacctgtaaaagtcgtgcaaatatgaaagcgttatcagcattaagacaggtattcagcctgaaaaagaacgaggaactcggcagaaagttctctcccgaagaattgaaacgtattgtcgatgccatgaaagagtatgcggcatccaagctgcaggagcagcgagccatttgtcagcgtgaatttgagttggcctatgactccggcgaaagtaatttggggacgaacccggccattaccgaattgtacgttctgcaatccctaaaagagagtgaaacccctgaacttgattgattatggcaaagacaaacagttattcacgtttttggacgctgctggcgaaaatgccctgttctgacagggacggtttaaagctgcagcttgtatccagctttacgaatgggcggacggactcactgagagaaatgactttgagtgaatataactcgatgatacgggagatggagaagcagaccggatccagccgtccggtcagttacgaggttctgaaaaagaaacgctctgccgttctccaccaaatgcagttgatgggtattgatacggcaaattgggcggcggtggataacttttgtttgggcgttcgtatcgcaggaaagaaattcagggagttgtccgctgatgatttggatgcggtattgctccggatccgctccatccggcaaaaggatatgcagaaagcaaagaaagaactcaattaacttatttataaaccatttaaaatgtgatattatggcacagattgaagaaaagcagactgttgaaatgacggcagaggaaaaggctcaattcgaggctttccgtaaagaaaaggccaaaaaagaggctcaggaaaaggcgaaagccgaacgtgaaacgtaccgccaaatggtggatgatgaagtgaacagcgcaatcccggtactcctctccttgagtgaggatatcaaggaaaccaaaaagacggtgctggagaactttaagagtatccttgacatgaaatgcgaggttctgaaagtcgtaaaggatgaccagcgcagccatacctttaccaattcggagggaaccaagcgcatcactctcggagtgtacgtgacggacggctaccgtgacacggtggaggacggcatcgtgatcgtgaaagaatacatcgagagcctcgccgacaatgctaaaacgaaatcactcgtgagcatggttttgaagttgctggcacgtgatgccaaaggcacgttaaaagccagtcgtatcgtccagcttcgcaaaattgcagaggaaagcaacaatgaccgtttcatggagggtgtccgcatcattgaggaggcataccagccagcgatcagcaaacagtttgtgagagcggaaatgaagaacggggacggtatgtgggtgaccattcctctgggtatgacagaagcataaggagggacggtcatgatatacaaagttcaattccaaatccaccgcagaggttaccgcaagctccggcttgagggtttgtacgtgccggaaacgggtgtcgagatgtcggttcctgaaatgaaacgtgacgttaccgagttcatcaaacgccagctttccagccggaacaaggaatttgagaattttcaggtggaactgacggttttcaaaaagctcaaaaccgatttcatgtatcacccgaaatcaagtgaagaattaaccgtaataaaggaggaatcagatggaacagacgaataatgcgaaagcccggtatattcccacccgtgtggctgtatgcaagcgttgcgagggaaaaggcgttgtattcgagtacagcgatgagaacaggacaaaggtatccggatcctgccaatgtccgacctgcctcggatccggcagagtgaaagtgaccagctcggtgataaccactataaagccgttcgttccgggtaaggatgacaaagagggtatgcttgcaatgtaaaagccctttaatcaataataaaagtccgctgaaatcctaattttcagcagacttttttcgtactatggtgcaaataatgtacctttgtattaagtaatcaaatcaatatgcaggagcagctcgtaataccgtttttttgcccggaaatagagaaagccggtaaccgccgcagaacacgcacggttgcctcctccgatgctgccatcacctcccgccgtgaccgcctcgaaaagcggaaccgcatcatgaccgcccgttattactattggactgagatcaaacgccgccgcttcgatgacgtgctgagaatcctttccgataacgagttctttgtcgaagagcgaaccatcagcaacacgctggtggaacaggatgatttttacaatgaactcctgcgttccaaagcatccacccgcaagctcaaagcgatgtttcccggctttgattggaactaatccataaactcggtttcataaatcacgttatagactttcagaccgtccgctcttttttccggcgcaccccggaggcggcgcatcgggttgaaaaggttccccccgttccaccattgcaaagcctcgtgtatcttatccaacgtgtccatgcaggagagagcgtgttccctgacaagtttaggggctgccgcatttgtactccctccggcttgaaaggccaccctgagttgtatttgcgcctttatcttttgccgtccacccatgtgggtttcgcaggacgggtaagatatatctatcaggcagcacgggaaagccacagcaggccgctctcccgtgttaagttgtccctcctcggcatctatccaccggagcccgggtacttctgttttcagccggtcacaaacggcaataaaaatttctttgttcatagctattcattgttaagtgagtcaatatatccctctatccgtgcgtgtatctgctcgttcaattcttcggaatctcccatgaattcacgtttcgggatgttagttttccgggtgtgcgccttgaccggtacatctttccgttttgttttccgggtgtgtgccggtacgggtactatacctttgaatccctcgttgtgtacctgagcgtaatctaccttttcattccctgcagagataaccacccgctggggagttatcaccgccggtctgatactgttcaccagcgcaccggagtcaatcagcagggaaccggttgttttcggtacttttgccggagtccacgggttcccgtcaaatgctttcttcttgaaagctgatttatagtattccgtggccgtttccgccacgatttctgccgcatcggagattatctcctccgggagcgattgcagataattatttaattctttgatattcatattgaaataattttgtatatttgcttccgtaagcatatcgctccggggatgaatcgaatatgccaacacctgacggatgacgggggcatcaaaaagtccgggctttatacggcggagcgggatgttaatccgtatataaaaggaggttctcagagcctccttttactttttgataagcagcccacggcgatatctccatcgtggatctatctttctgctcctgcggcctttcaccttgatgttggcgttttgttctatctcgaaccatgtcgtgacctgatagagcgttccgttcttgacctcgcaaaccacgttaatcaccttatcctcgtaaaacttgataaagttcaggttgtcgaacttcttttgatagtcgtttatccatacctcgtccgggtttttaagcacgtccgggatgcactccacgagaggaacacgagcctcctcgtatttctttgtggtgtggcgtttgaacacctcctccgtaagttgcaccttccggcctttgtagtcatccatcacctgatgcgaatccctccactggttcggatccccggcaaacaccggtgctttttcggtcgctgccgccgctttctttccaaaggactccagcccgtaatcattataatgcaggtcacccagcaaggaggcggctttatcgggaaacttgcggatataatgctggttcttggaaaacacctcagccgtttctccccggtttgaatcccagccctgagcctcgttcattttccattcactcgtaccgaggtattcatcgacaatggcacgcatggcgttgatgtctataccctctacctcgtgtttcatgagcggaaccacccggcaacggcatttccagccattgggcgggaatatctttttccaccgtggatcattggccggtaatatcaccccgtccagcttccggtgttcctcccttaccttttcatccccggcagtgacatatttccaataagggaacattttcgtttttcccatgagccggtggtaattgctggcggattccgccgttagtaccgccgtttcgtattccgtcttttgccacgttttattgaacgtgccacatatctgctctgcttttttggagaactcctgaaaattaccgctctccctgaacgccttgttcagctcctgaatttccgccagcgtcttaccggcggagaaatgaaacaggttcatctccaaagcggtgataaaagcgtcatcctgcaggccgtatgcgaatcttacatccgcatggttcattgaacgtttgaacgcactttgaacaccgctcaaaaagtcggtagcaataaaggagaacaactccgcatcgaacttcccggtttcgccgtttgcaatccttgcggccagcttttccgacatcggagcgttatcattcagcctgatgggggcttttccaatggatgccccgacctgcggggcttgcacgaaaaaatcccataagcgcataaagaaattacggtctgcattactgattgtgtcctcctccgaatcctctcctatatcgaactgagcggcctgagaggaggcacgttttgcgaccggctccccgtctttaggcacgggaatcgaatatttttcatgcaggtagctctgcgggatatccatgatgtcggagagctgcaccacctcggcaacggagagctgctccgccgcttttgggaaaatgaactttccgccagcaacgggataccctctcgcctccagcatggggagtaccttttggttgaggacacgctgtacgtaccggaggtcagatttattctttccctcctctacctccttgtgaacctcacccaatgaacgtgcgcctttctctccctgtacggtggtcatggtttgtccgaggatagtgatcagcatctcctcgttgttggcctgccggaattcgttgtacgaggatcctgaacccgttccgccctctttggtttccacatccgcctcttttgggatgaccacatacggtgcggatccggctttatcgaaagcctcctccagcagcttgcggctctccggatcatacgtgttgtatttaccgatgcgctggggcatcccgaaaagttcgatccattgtgaccaatccccaaagcctccacgtttgtagatggcatagggagccgccttgagtaacaaaccgaaatcccggtctttgccgagaatgagcagctgtgaatctccctcgtatggtatgcctatttcgtccgtgtcctgccggaggattgtgcggtttttcaggttgatatgctttgccggaatcggttccacgttgaaaccgtcattaaaggtcatttcaatgcctgaacgcccgtatattttctttttcaggatttcagtcagcagatcctcccatgcggtggtgtccatcaggtctgcgatctcctccacttcctccccagccgcattttggaaagtaagctccgagttcgtgaccgcatcgatacgcttttgaacggcatcgctcaaaacgccgtcaatcatgatatcatcaagcaggtcataaagctgctttgttcgtccattgtctgcagaggagagagccgtccgccaattccccacgtcatacactttccgctggggagccttgactacgatctgatggatgaccagctgctcctttgattttgccccggtatttgtcgtggccgtcttttttttcttgttcgccatagtcatatattaaaaatgttgattacgcttgggattgctcccgtagatatattcacctgcagtatccggtttcccgtcaccgtcctcgtctataatggggaggttaggcttaatgtctgatttctgtacttgcctgagccatgccacggcacgctcgtacctatcctgccggagctgcaggtcagtaccggcattgcataggttcacgaaatgccacacggctatgtcctttacaaaaatgagcaggagggcgtttctttggctccctgtggcctcgaaaatctttttgcggtcatacgcaccaagatatccgtatgcttcctgtacggcagcgtctatggctgccgtgaggattgtttcatcctccctgctgatagcctctatattctctttatagaggtgcgtttccaattctttgggtgtgataaatgccatgattaaaatctctttttattggttacacgtgcgcccacggtgtaggatccagccgagagcgtgcttatcttttggttgatgatccacacgccaccctcgatgcagtccacgccgtcagcgggtgatttcatagctcggttgatgagcaggaactgctcctccagccttttcatgtgcggattatccttttcgtcaatgttgaggatgagttgtcctcgccggttgatcggctcaaggtttccctcgatacggtcaaacttttccggtttcttccgggtatccggtatgatcccgataaatccgagttgttttcctttctcgctaaatagcggaacgaacacctgttcgtagaaaggatcctgcagtttgttattttcgatgtaattatatacctgcgttttttgtcccacgtaatcccggagataataataccagttcacgtactcctcgtttaccacgtggtcaagataaccggtataaacatagaatcgaccgtcataatacccgataaggaaacaggctttgaaagaggtggccttgttctttgagttggacggagccggatccccgtaaacaacggcaaactgcagctttgagagcggcgggcatttgccccataccatttctttgaacgtgtcaccctcggagagcgggttgttcatgtattcttgctggaacgcctttgtgctgattttggactggatacggttaatgcgttcctccgtgttcttttccggccagctggatttgccatccttgtcccggatgttcacgatatcccaatggtcagctttatcaccggcacgtttcacgcagcagtcaagagcgatcaggtttccgcagaatatcaccagcaaatcctcgctgatggatcgggttggaaacagagcctcctcgaaccattcccatttctttttcaggatgtccgggttcctgcagtccgcatccgtatcgaagtcatccacgagagccgtgtccggacgaacagcgtcctttcttgttccacgaggtgactccagcgcaccgatagcccggaatgttgccccggtagtgagagtgaattcatctgccgtccagctcccgaactccctcaagtcgccgtaatacgcctttaacatggaattgctctcaaaggcttttttgtacggttctaatagtcggactgcgttctcgtgactgtttgatataagcagcacgttccttttcttcccggtcagcacgaggtacatcatacacatgaacacgatggtggattttgccagctcacgtgaccacgagagaacctcgtaccattccatattcgtggtgatgcgtttgattgcctttttgtggaacttggtaaaggggtactttgcgaactccgagaaaaagaacaggatccattcgatgacgttcgcctccagcttttccagcttcttttttcgttccaccggcgagaggttgtcggcggctttgtcccttttgagtgaacggtggtattcagtccactccttgtatgcctgaatatcatctattttacccatttcattttctcctttatgtacgcatcgaaataatcactcaactcctttgccctttcgagatcctgctgtcggagccaatcgagcagcccacgggacacgttgtatatatccctgatggaggcgtcctgttccaatgcctcaaggtcagccgtcagtttgcgccgtatatcggcctccgccgctgagggataccgtttcccctcctctttgcctgcgatggagcggtcgagttcatccagctgcgtgagcgtggagctgatccgttcctcccgtgtctgcaggaggttgagctttaaaccctcccattccttaacccatttgttcaccgtgacacgggaaacacctacccggtcggcaatttcctgctgggtgatgttctctttgagatacatcaatttcgcccattctttccgttgatttgctttcagttcttccgccataattgtatcattttatagcccaaaggtaaagccttgcggtgagtgaaaataattggtttgtaatggtttacgtttaaactgaaatggctgcggtttaagttgaaacggttacaggccgatttgtacagcccgttttttaccctgaattttgtcacaaaatcaaacgagcgaaatgggcaaattaacctttgtattacatgatgagtcggtgaacacctacggttttaggatgctcaccagcggagccaatttggaggagtttaaaaagaatcccgtgatgcttctgaatcacgatgattactccctgccgattggccggtgggaaaatatacgtgttgagggaggtaagattttagccgatgccgtgttcgatgagggagatgcccgtgccgcagaggtaaagcgtaaagttgagaatgactttatccgtatggcctctatcggtgcgtggcctccggaggagaaaagcgatgcctatgacctgatgctccccggacaaacactccctaccgttacgagatggacggttcgggagggcagtgtcgttacaatcggagccaatcacaatgcgctggtattctatgacagagagagcaaacagattatcgacctgaatgataagggtaatcttatccggttgatagatcacagtaataaccccaaaaaacaattaaaaatgagcgtacttacaggagtattgaagctgcaggactctgcaagcgaggcggaaatcgtaaccgccattcagggaatcatagccaatgccgaccgtttggaaaaagagaacaagacgttggctgccgcaatggataaaatgaacaaggacaaaaaggaatctcaaaagcaggaggcgattaccctgactgatgcggccatcaaggacggacgttatgatgcgaaaggccgtgataacctgctgaaccttttcgataaggatttcgagggaacaaaggctatgctggccgctatcccatgccgggcgacggtaaccggtcagatcaacacgaataaaggagccggtgtgacgcttggtgattggaaagaaaagtcatgggatgagttggataaggccggaaagctcgttgagctgaaagatgccgccccggacttgtataagtccaagtttaaggagcgtttcggcatcgaaccgaatctgtaattattaaccagtaaaacaagaatagaaatggcaattcagaaagaaatttggatggcggctatcgtggagggtttgtttgcctccaatagcttcctgagcaaggcgttcaacgccgatgagtacgtgaacaacggaaaaattgttcacattccgaatgccggtgcagcatccggaaccaagaaaaaccgaaccgaacttcccgctaaggtaaccaaaagaacggatatcgatgtgacgttcccgctggatgaatacaccactgatccggtacttatccctaacgccgacacggtggaactcagctatgacaaacgggagtccgtcctgcgtcaggataaactcaaactgcaggatgatgtggcactcgatttcgttttcaactggagtcctgctgccgcacagtgcattgaaaccaccggtacggagatcgatgcctacacggataaggctaccggcaaacgtaaaggtatctgcaaggcagacgtgttgggcttgatgaccaagttcaataatgatgatatcccgcaggaggggcgttatttgctgctggatgcgcagatgtactcccagctgttgaacagcctgacggagaacgagaacacggcgttcctcgcttctgctgatgcgcagaacggtatcctcggtaagctgttcagctttaatatcatgatgcgcagcagggttgccctttatactgcggacaaagctcccaaagcgtggagtgccgccggtgcagccaccgacctcgccgccgggcttgcatggcacgagcaaagtgtctgccgtgcgctgggtgaggtgaaagcgttcgaaaacgagggtgacgcaacctattacggtgatatttattcattccttgtacgtgccggtggccgtatcatgcgtgaagataaaaagggtgtaatcgctttagtgcagggaactcctgtagcaggatagagttatggcagaattgaaatatttggtaatccactgtaccgccacgcctcaaggccgtaaggtaacgggtaacgatatcagagcatggcacacgaacccgataagcaagggtggccgtggttggaagcaggtaggatataccgatatgtttcaccttgatggaacggtggagcgattggcccggaacaacgaggacgcacgggtggatccgtgggagattaccaatggggcaaaagggtacaattccatttcccggcacattgtgtacgttggcggtgtggccgctgacgggaagactcccgaggacacccgtactcccggccagctgaaagcgttggaggattacgtgaaagacttccaccgccgtttcccacgggtgagaatcatcggtcataacgagattgcgaccaaggcgtgcccgtcattcgacgttcaggcatggctcaggaaaataggcattaaccaataacaaagcaaagagatggacggtctgatggattttttaatgttcgccctgccgggtggttttatcggtagcatcttcacgtggtttgttggccgtagaaagcagaacaatgatatgctctcccagcttcaggcgtccatcaatatgctcagtagtgagaaccggaagatattggatgagaatatccagctccgcagggagaatgccgacctgaaagcgaatcaggaggagatgatccaaaagctctcccgcctgaccaaagaggtggagaggttaagaaaagtaatcaataaacaaacaggaaatgatgagaaacctaatccgaggggcaaccctcgcactaattatagccgtgttcatcctgactgggtgtgccacggcgaagctaaccaagaaccggcagtcgcacacgctgacggaacagacgaaaagcggaactaccaccggagtaaccggagagcagtcagacgtgacggctcagaggacgggggagctactgcagggacagacgataaccgccctgacacgggaggggatcccggaatcggaggcgaaagtggatgttccgatacagaacctccttaacttgccggacggtgctggctacacggccaaagacggtcaggcatcggtaagcgtgcaaaggcatggcgataacatcacggttaccggcaaatgtgactctatcgcccggcaatgccttttctacgagcgtgaggtgttccgacagcgtagcgaggtggatagcttgaagcgggttatttcccggatggagcagacagccagccagagtgatgaattctataatgaggacagcgatgccgttcaaaacattaaggaaaagcctcctgctacatggtataaatggttattggtgggtttcgtggccagtctattgcttacttccccgctaaagaagctaaagaatagagtattaacttttataaaataaagaacaatgtcaaaagtttatgtgaatgacggatatatgatgctccttgatgcgatctatttcgatggaaagaaaatcggcaatgtttcagaggatggcatcgattggggtggtgatgcggctgagtatatcaagctctttgccgcacaggtacgcaatgccccggtaaagaaaatcaagaaaaaggatgccaccaacctgttaaagttcaccctgatagaacttgttccccaaaactgtaaggacgtgatgggcggtgaggtgaacggtacgaaatgggaagctccctcggagtccgtctcgttggagggttcgcttaagatcctttgtggaaccggtcagaccgtggaggtgaaacgcatgacgctggacggtgcagtccgtggcaagattggcggtgatgatccgctgggtatcgagtgtgagatggagatgatgaaaccgctggacggtagctctcctttcagttttgatgatacggctccgtttatctccgtaacgcccacctctttgtcattcgtcaaaggtggagagaaaaagacggtggatatcgaagcctccggagcgttctcggttggaaaggttcccgccggtttcagtcttgaggttgtaaacggcaggatcaccatcacggcggatgccaataccggagctgtaaggaacggaacggtagagtttacccttgcagctgataatacccaaaaagccactctcacgttgagtcaggcagccggaaatgcgtaacccatgagaaagaacgtggaaatagaggcagcggaggctctgcttgacgtgggggtttccctgccttttttgcagtttaagatgccattcagaaagaaaccggtatcgatcagggtaaccatgaaacgtccctgcttggggagtcagatccggatcgcaaggctatacctgcagttgggtatcacatacgaggagatggagcagttcaacaagcatgaggagatggcgttccttgccattcatggcaaacgtgtttccaagatggtatccctgaccatctgccgtggggcggtttccggtctattgttttccggtattgtcgcatggctcttgagatggtttgttcctgacaagtacctgcagggtgctaaccagcgttttgtcactttgcttggtacaaagtcttttatgcgtattatcgaatcggttcagatatccaatccactgaaaccgagagagagccaaaaaagaaaggggagttaagaacgaaatatgtcggatcccatagcccctttggtatagtgtggcagatagctgcggccaccggctggagtgtaaaatacattctttggggtgtcaattaccaaaccctccggatgatgcttgccgatgcgccacattacgagaaagagaatgataacaaccgaaccggaagcaaaggcggtaaagggaaacctaaaagcctttccggatttttccaatcacgattgaaagaacaatgaaacccgttgagatagaattcataatgagagacaagctctctcccggcattgacaaggcgggcaagtccgccgaaacgctgggagataaggccgagcaggtgtctaaaaacatcacagaccgtattgccgcccaaaaagagcagatcaagtatgttgaatcctgtctcaaggatttaaagaagcagtacgacaacctcgcacccggaaaggcgcagctggagatgcgtgcggagatagatgcctgtaccaaagccctgcaggaggacaagaacatactctcctcccttgaagcggagcatgacaaggcagccgtttccaccaaacgtctttcgatgcagctccgggagatgcaggatgcgatggctcgcctgcgtttggagggcaaacagaacaccaaagagtatgcggatatggccgataaagccgccgtattagccgatacgatcggtgacctgcgtacccaaacgaatattctcgccaatgatgatgcagccttgcagggagtgatgagcggtgtgaatggcttgtccggtctgttcacgaccgccaccggtgtcatggggattttcgcctcggaaaacgaggatctgataaagatacaaacccgtgtgcagagcgtcatggccgtcactatggggctgcagcaagtcatgaataccctgaacaaggactccgctttccggctggtcaccgttgtcaagatgaaaaagctgctgacggcggccaatacaaagttggccgtgtcattgggcatctccaatgcggctgccaccgctttgatggccacccttacgctggggctttccgccgttataacggggcttatcgtgctttgggataaatacagcgatgctcaggaggcagcggcggaaaaggccaaagaacgggttaaaatagaaagtgacgggcgttcccaaatgatcaaaacccgctttgagatagagaataccacgaaaagcctgaaagactttaccggtagcaaggagcaggaaaaggccaaagttgaggagttgaaccggaaatacggcgagagcttcggatattacaataccgttgccgagtggtatgatgtgctgatccaaaagagtgatgactatatccaaatgcttttcctgcaggcgaaagcccaaagtcttgttaacaaggccgtggaagcggacgaaacggtgaacgaggtaaaagccactcctgaatccgatgtcgagggttcgatgggctggttctctaaaatggggctttatatggctcaaagcgagtcttacggtcagattgacgctcaggcgttgatagagaaacataataaggaggccaaggatgcagccgtaaaagccgccgaggagcagcgggacgcttatttggaggaagcaaagaagctgcaggaggaatatgccgagctgggaaagaaatccggtatcggcgggttcgtggctcctgagaacaacaaggataaagcgaaaccggccaacaaccttgccgagttagaactgaaagcccgtcaaaagatagaggatcagcgtatcgccatcctgaaagagggatatgacaaggagcgtgaggaggcatcgttgaactttgagcgggagaaagagcgtatcaaccgtgaggagcaacagcgcattgaactttataacaagctgaaagccgccggggaaaaagttactcctgagcagcttgccaatatctcggcacaggccgcaacccagcgtatacaggctgcacagatatatgatgccaccgttgcagagattgacggtaaggagaaaaaggataacgaggagaaaaagaagaaacagcaggaaaccctgcaggaacttctgactaaatatcgtgactatgaggcacagcgtgcggctataaagaaacaaggtgataatgatatcgctaaattggaggcggagcggactgaggcaaactcggcggagattgaccgggcgatagccgtcgcaagagaaaaggtaaaacaaggcatccaatcagtgaatgatgcggaggctgacagtatctcaaaggacaatgatttctttaaaaagctctttggggattattcttccatgtctttcgactcactgcagaaacttatctcacaggcgaagcagttgcgtgcatatttatccggcaagggagatgcgaaaggtatcacgttcatctctccggatcaactgaaaaacatagagaaaagtccggcagaacttgaaaagctgaaaaaagcccttgataaactgctcgataccggcaagggaggcaataataagtgggagaacatcttcaagacatttgagaaaggctttgccgaactcaaaggtgcgaaaggagccaaagaggtgtccggcgcaatcggtacgatcagcggggctgcgtccgaggcggctggtgaacttgccaatatgtttgaccagatgggtaacaccgaggttgccgatgccctgaacggtatgcagcaggtgatgggggcggtttccaatatcggacaaggtttcgccaagggtggcttgatcggtggcatcggtgcggctatcggtgaggccgcaaatttcctgacctcggcctttgctgcggaagcccgccacaaggaggctctaaaagagattgaaaaggctaagctcgatttccagcggcaatacaacctcttactgctggagcagaaccttttgctcgaaaaggcggagaatatattcggggagcgtcaggtagcaaaggccgccaatgcgatagaggtctatcgtgatgccctctcgcaattcaaggaagaactggccggtgacgctcccaccatgaactggatagagcgcatgacgggtgattttgccggaacctaccgcaaacggctggagaactatcagaaaggttttggcgggttgaacgatgcgcagatcgttacgggacataaaaaaacgggattgttcggctggggaaaaggaaaggatgtttatagcgggatccttgatgtttaccctgaactgataaaggccaacggcgagctggatacggagatgctccaagtcattctcgatacccgtaagatgagcgatgaaacccggaactatcttgagaacctgatcgacctgaaagatgcgatggacgaggcggaacaggctttggaggattatctgcaggaaacgttcgggagcctcggtcagggaatgctcgactctatcacttccgccatcaagggaagcggcacggcattggaaaattttgcggatcaggccgcttccgtgctggagaacctcggagagcagatcgcatattccctgttctttgccgataagttcgatgacctgcagaaaaagttaaaggcggtatatggaagcggtaaaagtgaggaacagattgcgggtgatgccatgcacctgatcgatagcttttatgacaatatcgggaataacgttgatgcggctcaatcgtggatggaagcgtggaaagacaaggccgccgctatggggtatgatctttggaaaaacgatgaggaaaagactaccacccaaagcgggcgtgccggtgctttccaaaccctcacacaggatcagggtacaaagctggagggattgatgacctccctgcagatgcacgatgcctccatcgatgagaacgtggagaatatatcagagggcataggcggagcattggaaacgatcgataagataaagacgaacaccgatgccttgccaaagatatacgatgagataagggatatcaaacaaaacggtttaaagatgaaatgacaatggatattttaaaaggcttgttactgataaacggggttgatgtctttgtggattatggggcattcctcgcagaggagaaagcgggtgataccaagaattactccgccctgctgaaaccgccatcggcaaagccgcacacggctgtgtcattccgggaaaaagacggggagaaactgcctgatgcgcttttacccgcatgggaggctcgtgatgtcaccctgcaatttgcgatcatagcggcagaccgggcgcaattcctgtcccgttattcgtcattcctgaaatttctcaaggccggtaataagggatggttgaccatcaacccaccggagcttggcaggagttaccggatgtattacaaggattgcacggattacacccagctgaccgatttcgggggtgaggtcatcgcaaaattcagcgtgaaatttcgggaaccggttccctcgttatagtattcaaacattattcaaacagcgttcaaaatggagcttaaaatatacaaccagcaaggggtgttcaagactgcggtatcgccgtcagactccgaccgccacgtaaaggaagtgatgaatgacaatatcctgaatttgtcgtttaccctttacgagtacgtggaactgggcgtgaatgattacgtggattttgagggtgaacgcttcacgctgctggaggattacaagccggagcagaaatccaccgttgagtatgcctacagctgcaagttctacggtatagagagtgagcttaaaaaggccaaagtcctcaagatggtggacggtgacgatgagctttccttttcctatgatgccacggctgccgaacacctgcagctgatatgtgacaatataaaccgtatcaaggggacgaaaaattgggttatcggcgaggtggtgtcctccgctaatgtaaacatagagtatgataagatattttgtttcgatgccctttcggaaatagccaagaatttcaataccgaatggtggatcgagggaaccactatcaatctgagccgttgtgaacacggcactcccgtatctttggggtacggaaaggggctgctcaggctttcccgtgtggagaatgatacggttcctttctttacccggttgtatcctcttggcagtacccgtaatatcgtggcctctgattacggccaccgccgcctgcagcttccgggtggtgtccgttacgtggaaaggaatatccatctcggaatcgtggagcaggcggaggaggaggcctttgcgtacatattcccgaaacgaatcggtactgttacctgtgtcaggacggaagaggccacaggtgaggacggcaatgcgttcactatatattattttactgatgaggggttgaatttcgatccgaacacgtatgagatcgaggggcttgttaaacaggtgtcgtttcaaggcggggagttgaacgggcgtgattttgaggtgaatttcaactccgagacaaaggagttcgagattatcacgcaattcccgtatgagaaccagcagctaccgggcggcctgctgatcccgaagccgggtgacgagtatatcctttggaacatacggatgcctaaagagtattatccgctggcggaaaaagaattcgaggaggccgttcagaagcatatcgagtcgataagcattgatacgtcagtctataaggctccaaccgattacatctatttggatgagaaccatatcgatttgaaattggggcggcgtgtccttttggagaatgagatttatttccccaccggcactcacgagagccgtgtgaccaagatctcccgccgggtgaataataccacagatatggatattgaatgcacgtatgcggttgattacgggcgtatcaatcagatcgagagtaatatcgtggatattcaggcagcctataaggaacagctgaataaggacgtgctgaccgtattgaaaagctgggacagtattgatcccaccgagtataacgtcctttccgccgtccggacaatacgcacgatcgcaaattccttgagcaagctggaaaaagaaacggcagacaaatacctcagaaaggacatacccgacacggcgaaagagcttgaaacctttttgaaggggataaaggttatcggcgaggctcttgttgaaagccttacggtagagaaagactccactttcaaaggtctgctttcctccgaggtctttacttcgggtttccccggcggaaccggatgggcattgttttggaaagaggtgcttaatgccgcaggagtaaaggaaaagaaagccgtcatggagctggacgagatgaccgtccgtggggttatgcgagtgtatgaatttgtcatctcacaactgatgggtgagaacggaacccgtctgacaactgacatgatgcgtgtcgatcacatcgatgcgggcacaaagacaatctatctcgatacggagaaaggagtcctttacaaccctttccgtccgggtgatatcctgatggttcagcgtttttccgtggatggtatcatcaagcagtacgaactgcaggtggtcactgccaaagtcggtgatacctccaaaggagaggaacggctcgatagcatcacctataagaattttgtaggcgatgagggtagtgttgtttttcgtgacgtgcttacccgtgtggactccgccaccaattcagaccgcaaaggggttatcaaacaaaccagcgttgaggagggcagtccgtatcttgatgtcctgtacgggatgaaaacggatcctgacaacgccgtgcgtctccggcttggacgtctggccggtattattacctattggtgggggcagctgcagggatatggtctgtattccaacaacgcctatctgctgggtgatttccgtctgcgtaccggtgaggatgtccggacgaaattcgagataatggagggtatgctgcaaagtgccatgcagagcgttgtgggcacgatgaccgaggaggataactttttgaaaaacgccagctttcaggatgacatggcttattgggagcgtgagagtgatatggctttatttgatatcggagggcagctgcttgatttaggcgtgaatttctattccgagaaaaacaaggtggccgatattgactctttcgatggccgtttcatgctccggatcaaacggagtcacattcgccagctgaatgcggatatcaccaagccggaagatggcagcgtcatatttctaaccttgaaatatcattgcgccgaggaggggatcctgactgccggtttcagtggatccgctccctatgtggagcaggttattccggctggtgagggctttgatatactggagatatcaggagtatggaacggaaccggtgattttctcctgaaatttaccggtgacttgtatatcgagcagctaaccctgaccaatcatccgttagaggattataaaaaagaggtcagtaccaagttcgagcagaccgccgagcatattcttgccgtggccgaggaggtgaataagatagaccataccatcaagaccgccggttggatcaccacggcagacggtaacaagctgtgggctaccataaccgaggtggacagtcttggcaatcgtgtcaccacgcacgagagcagctttcacgtgacggcgcagcagatcaatgctatcgtgagccgtatcgataaggcggaggatgatttgggaatcatagaccataccatcaagaccgccggttggatcaccacggcagacggcaacaagctatgggctaccattgaccgggtggatgtccttggcaatcgtgtcaccacgcacgagagcagctttcacgtgacggcacaacaaatcaatgccattgttagccgggtggatacgatagacggaaccatcagcaaggctgggtggattactactgcagacggcaataagttatgggcgagcaagacgcttgagaatggtgatacgattgtttcctatatcaaccaagcggcggactccgtgacaataaacgccaagcatatcaagctggaggggcttgtaactgcgaatggtaacgtacaattcaccacggatggaaagataatcgccaagaacggcgagttcagcggaacggttgtcggtgtgtcgggttccttcaaatccttaaactgcgtgaataatagcggggatattgtcggaggcatctcctttggcagtgatggaaagatgtggtttaacggtgacctgtatcatcagggctatgactatgacaaaaaacgttctttccgtttctatacctccgatgtttggtgtcgtggtaatttcggggcaaggcaacgcaatacactggtggtatatggcagttatggttactattacgtaaatggtttggatacggaaaccggtaaggtatatgtctccctaccctcggccacgtcatccaataacgagacctattataccattccgttatacggaaccaccggggatgcttccggtttccctgttgacttggtgatcataaaggtttcagggacgtaccggtatttattgagcgggatgaaaagccagcgggtaacggtcatgaatgcgaataatcaaaatagtgaaatttatatctactcgaatggcaataaggtaaaatggccgggcggtactatcgctgattgtaggaatatagcggatttcatgagtccttcaccggcttctaacttattaggcagaggatggatagtgggcgcaatgaatgataataactggtaataataaaaaggaggtatttatgaaagtgaatttgaatgttccctttatgaattataaggggttggtgatcacgaaaaaggtagagggtacggatgtggaacaggagcagctgatgaaagatgtcattgctccgatcctattcagtggggagtggagagatgagagggtgaatgctttgagtggtgatgaaaaaatccgtgcttatagcttgagccttaagatctatcaatccaccggagatatcgaaatctcagcggaggaggctctaatgataaaagaagccgcattggttttgagccccggcggttacgcacaaattgtcaaattgatagacggataagttatggtactgacagaagctcaattgcaggaaatcgctaaacgtgtgcgtgcgatcatccgagccgaatccaaaggcgtgggtgatctaccggtggccacctcgttggatgggcttctctcgcttccggccttgcgctttaacggtggcgtgccggaagtagtagaggctcctatctccaaattgcaggacgtggcattggatgcggtcagtggggcaacgaaagccgccaatgaagccgcagtaaaagccaacacgtctgcaggtaatgcagataaggcaaccacagcggccaataatgctgccaaaagtgccaatgatgccgccggtactgccggagcagctaccgaagcggcaaagaaagccacggatgcggccaacggagccgcctccaatgccacgaatgccgccacgaaagcgtcctccgcagctgatacggcgaataaggaggccagctctgtaaatgcggccaaatcggaagctcttgccgctgccgcccgtgcgagcagtacggccaccacagcagaggccgaaatcgagaagatgaagcagctgcaggaatccatatcgggtgcagcttcattggctcccacgaggatggaactgacctacacgaaacgcatcacccagcgtaatccttacgttcagcgtatcgtggccaagatgttcccctcgtactccctgcagaatgttttgttcttgggtgatgacgtggccgtgagcgtggatcctgccggtattgtaaccccgttgaagatcggaacgagccggatccacgtgatcccgacacaggccacccacttgtacaagaccataaacgtgacggttcaggctccgtccgtccgccttaccggaggcggtaaaatccgggttgacagtaaaggcagaatacgtttaacttaaaaacttgataaatatgacaagcgatcaggaaacccgtgtgttagcgatgctttcggcttttgaagccggaaagaagatcagcgaactcgatactgcctccggcagcgtgagcgatatgcgcatcgaggtgctggacacggacggagagtccaaagttatgaatttgtccgaggcggttaccaccgccgcaaacgccgtttgtggacgttattggaatgaatcgaattccacgtaccgggctgccggttatcacggcagcctcgatatgctccgcaagctgccagagctgttgggacttggttgttacctcgttcaggatgaccgtacccggcgcaagctggatcccacgaaccactaccgtttcgaggacggcacaccggcgaagctggacggcacgatgggacagtatatgtggtgttggaatattggtttttattttgccgagtggaaagtgggtaatttgaaatattatgccgtttccctttctcccatcaaaggcaaacagtgcgtgtatattcccgccggtggcctttccgccctcggtggtggcgtgctggacaggacgaacaatatcctttgttcggttgtgagtgatgccgcccaatatcgtggtggaaacaatgatgcaagccgggacgggacttaccgcacgcagttggggatggttgcaaccaatatgcagtaccgtaatttttcaacttatgcccgcaagcgtggcgagggttgggatgccaactggtacgtggctcaggcggtggttgaaattcttttcatgatcatattcggaacccgcaatatgcaggaggccgtgattgctgaaaaggatagcaacggtctgtatcagggtggcctcggagccggaaccactaatatgccgaattgggatcagtggggttattacccggttgttccgacctctgcgggtattgagttgggtgacggttgcggtgaaaccacgttcaacgtgctaaaggaggacggctcgctgcattatgcggcaaaggttccggtgttctttggcctgaaacatcctttcggccatatatggaaaattgtccgggggcttatcgataacgtgggtgatgagaaatccgaggtttatgttgccccgtccctttatgccggttatgatgacaattcgatttccggtctaatcaaggtttgcgaggttccgagaaccggcggttatatcaaacagaaaagttactacttgctttgcgccatgccgaccgaaatcggagcgaccgcctcgacttatttctgtgactatttttgggagaattcagcatcatccaaagggcttcgtgtccgcctctccggtgctagcgctaaccatggcgcggctgcgggggcgtttgctacggatacgctcaatgcggcctcgcattcgagtgcgtatgtgtccgctcccctctgctttttcgatgcggatccggtgatgtcggcctaaaacgaaaacggaaagaggaaaagaacgttctttgaaattttgtattgagagtttttggaaagctgttcggcgggtttcggaactcgccgttaggcgagtcgatttttgtgatttttttgccggttttgggaaaatgtagttaaaaggcttatctttgcatcgttaaaccaagtttaacaggttgtttttacccttagtgtgacgcaggcttcgtgtccgcctctccggtgctaacgctaacaatggcacgaatgcaggggcgtttgctacgaatacgaacaatgcagcctcgaattcgaatgcgaatgtgtccgctcccctatactttgcagttaggaaacggttagatggggtgaaagaccttgccacttggcaaaagatgacgaacgctcaaaaggacgctggtaggccggtaacggttcgaacgcttccgagtaaggcaaagcagacactcagacactcagaaccgcagaaacagaccatgaaaaggtatggaaatttgtttgaacgagttgtcgaatatggcaatctcgaacaggcgtttcacaacgccgcccgtcacaaaactcgccgaagcgaagtaatagagtacggctcccatttggaggcgaacctattacagctccagcgtgaacttatcaccggtacttaccgcacctccgaatataagactttcatcatttacgaacccaaagagcggaagatctttaaactgccgttccgggatcgtgtcgttcattgggcgataatgcaggttattgaaccgatatggctctctaatttcacccatgatacattctcttgcatacgtgggcgtggtattcaccctcttttatacaagctccgccgtgatttgaaagcggatccggagggaacccggtactgcctgaaaatcgatgtgcgcaaattctatccgagtatagaccacgagatcatgaaacaggtaatccgccgaaagctgaaagatgcccggctgcttgctttgcttgacggtatcgtggactcggcagagaacggagtgcctatcgggaattatttatcccaattctttgccaacctttatttatccgaactggatcatatcatgaaagaagaaatgggcatccggtactattaccgctttgccgatgatattgtcctgctggatggaaacaaggagaagctccacggaaccctcgtgtttatcaaccactacctgaataatgaacgtgctttgagtataaagccgaattatcaggttttcccggtagagagcaggggtattaattacgtgggatacgtgacgtttcatgattattgcctcgcccgtaagcagaacaagaaaaacctctgccgtgaggtggcaaaattacgcaaacgtgggctgagtgatgaggagatccgaatacaggcatccagccggttggggttcatgcagcattgcaatagcatttatttattaaaaactctcaatatgaaaacattcagtgaagtaacaaacagcggtggtaatctcacgggagataaataccacattgatgacattttgaacagggaaatccacctgaaaggtttcgaggtaaaagaatccaagtataagggtgaatgcctgatcattcagtatgatatctacgagcaggtaaaggataaaaccggagttttgctcactaacgaggacggcactccgaaaatggattgggtggaacatatctcctttaccggttcggaggctcttataaaacagttaaaggatgtagtattggatgaaccctgttcggcaaagattattaaacaaccaatcggtgaccggggtaaatgcttttataagataaccgatcccgattaaaatatcggtgattatgtacaaagggatttatgcagaaaaaaagactttttcaaagttcgataacgaacattatttgtgctatctgaacgagcagcgtgaggagtattctcctgagtcggatgcctgttcgggtgaggtgaccgaaccggtgtccgctcctgtattgggatacgcctatacaggtgatatggtggatggaggtactctgattgaagcaaaagaggctacttatgacgaattcgtttccggtctgatccgcacgaggtactcggcaagcagagtggaggcaattcaatcaaatcgaatgatagctcttgtcaatccggagcatgagcgtgctgccgagtttatttccgagtgggatgattttcagtcctaccgggaacaatgcaaggaacaagcggatgcgcttataaacggataaatgcctatcgggggcaggctataaaaatgcccccggcctgtaagtagttatctcacccacatacttacacaaagatgcgccatatcgcacagccgggggcaaaattccctctgctgcgatatggcgcatttgtatgttatgtgagtgagatgtcgcaaagatagtaacatttaaaggaataacagcaatgaaaacacctatttcttactacggaggcaagcaaaccctcctgaaacatattctgcctctgatcccaaatcataaactttatacagaggctttctgcggcggtgctgcagtattgtttgccaagcgtccggctgatggcgaagttataaacgatatcagtatggatataacgaacttttattggatggctaaagtctattatcgtgacctgaaacaggagattgagaagactttgcacagccgggatatgcacgcccatgccggacatatcctgcagtatcctcaattcttccaaccggtgcagcgggcgtgggctgtttgggcgttgtgtaaaatgtcctttgccagcatgatggacggttcattcggttatgactttggtggtggaatgccgaaaaaactgcgtaatgcaaaggatgagttcacggaatggctatgcgcccggcttgataacgtgaccatagagaaccgggatgcgctggatgtcatctccacttatgactcgcccgatacgtttcattttgtggatccgccgtatataaacagtgattgcggccattacgagggtacatttgatgagtattgcatggagaagctcctgcagcttttggagcaggtgaaaggtaagttcatgctgacaatgtttcccctgccaatgatagaggaatacgcaaacaaaaacggatggataatccaccgggtagaaagaaccatcagcgcatcaaagacgagccgaagaaagcaggaggaatggatggtatgcaattatgaagaacacccgcagcgaactttgtttgattacaaagacagcagcgatgttgatgcaacagatgcctcctaaatactgtataaagatagtcatttctaatgaattgcacaaatattggaacgtattttttatgtgaaaatgcaataattttaaaggctttcaaacaccattcaaatgacgtttgaaagcctttttatatcgtgcgtgtgcgataattttttcacatttcgttttataccctgattatcgcatttcgttttttataccgctcgcatttcgttttgccgattatacattttttcgtaacccttccaatatattagtttatatttgtgataccagtgacaagcatcaggcggctcgtgaccggaagtttaaaatctggtttaaacagtatgcttccttggatgatctggtatttgtctcggaagtgatagatgtggaggatgattcttatttcgcttctatgattctttccagacgaacaactgattttaatcaaatacagacagctttccatgattatttccaagatttacgttctaaattagaataatcatttaactatttctatttataaaaatcaacatgatagacattttccatgatttctatcgtggaaagcgtgtgcttgtcaccggtcataccggtttcaagggcagctggctttccatctggctgaatgagctgggcaccgaagttatcggtgtggcccaagaccctttcactgaacgtgacaattatgtactttccggcatcgggaaaaagatcaaggcggacttgcgtgccgacatccgtgacggtgaacgtatgaaagaaatcttccgtcagtatcagcccgagattgtgttccatctggcagcccagcctttggtacgtttgagttatgatattcctgtggaaacctatcagaccaatgtgatgggaaccatcaacatattggaagcgattcgcgcaactgacagtgtgaaagtgggtgtgatgataactactgataagtgctacgagaacagggaacagatctggggataccgggagaacgaaccgatgggcggatatgatccctattccagcagtaaaggtgcggcggaaatagccatagcctcttggcgcagaagtttttttaatccccgggaatatgaaaaacacggcaagagcattgccagtgtaagagccggaaatgtgataggcggtggcgactgggctttggaccgtattatccccgattgtattaaggcattggaagcaggcaaaccgatagaaatccgtagtcctaaagcaatccgcccttggcaacatgtgcttgaaccacttagtggctatatgcttcttgcgcaaaagatgtgggatgaacctgtgaagtattgcgaaggatggaatttcggtccgagggctgaaagcatcactaatgtgtgggatgtagcctctatggtgatagagaattacggaagcggtgaattgaaagacctttctgctccggatgctttgcatgaggcaaagttgctgatgttggatatcagtaaggcaaaatttcaattgggttgggaacctaggatgaatattgacgagtgtatacagctggttgtagactggtacaaacgttataaagaagaagatgtgtatggattgtgtctggaagaaatcaataaattcatcggataatggaaaaaatatttcttataggtggtagtggattcataggaaaaaatctggtacgatgtctgtcgccttattatcagatatctattttcgacaagtatattgatcatgatttttttgtagattatccttctgtaaatgtatatcaacttgacttggtagcagataaaataccatcggaaatcattgctcccgattacatcatcaatctggcctctatagtgaccgccgagcgtgatttgtccttgtttgatgaattgatatcatccaatctgaaagttctcctgaacttatatgaacgttttaaagatacctcttcattgaaactctttatccagttcggcagttcagaagaatacggttcaataagttcgccattcaaggaagaaaaccgggaatatcccaattctccttatgctttggtaaaacaactgacaacaaatacagccttgatgctccatcgtaattatggctttccggcaatggtcgtccgtccgggcaatctgttcggaccgggacaaaataaaaataagtttattccttatgtaatagacaagcttcggaaaggggagtctctgaatgtttctccttgcgaacagaaacgcgactttatttatgtggatgattttgcagaggatattcatggactacttaagaattataaaaagtgtgagggtgaaattgtgaatgtgagtagtggaaatagtatatcctgaattcaaacagacaatgcaacagtgtcgaattcattgttagttaataatttatatttttcctttggggtcatgtaacccaatctttttctcggtcttgagtttaagatgttttgaacgcgcattacctgttcattggttatgtccctaaagtccgtacccttcgggaagtattgcctaatcaaaccattgctgttttcattggctcctctttcccacgagtggtatggttttgcaaagtaaacaaaaatatttagtttacgtgcaatttcttcgtgaaaactaaattcttttccattatctgccgttattgtatgtatttggtctctaaaaggttccaaggcatcgatggcagctttagttagcgggctggcatctttcccgctaagtagtcttatccatactagtccagttaccctgtcgtttatagttaatagtgctcctttgtgattcattccaatgactgtgtcaatttccaaatcaccaaaacgtactttcttgtctactatcgtaggacgcttgtctatgtccacgcggtttttgataaaaccacgtccattagtcaatgcacctctcttcttatgacttcttccccgtcttcttaaatgcttgtataacaacttatctccatgctttttatcttcccaaatatactggtagattgtctcatgagaaactgtttccaagccctttgttcgcataaacccagtcacttgttctggactgaaatctttctttatgagtatatctacttgaattttcaagtcgtccgtaaacttcacgaagtgctttcgtgaacgcattctggacatatacttagcctgagcgagatccggtttgtaaatgccattacgtttatcactattacgacgtaattcacgacttatagtgctacgatgaactcctacaagattggcaatctcggttcttgactttccgctttgcagataagcggaaatgttatacctttgttcttcggttagctgtttcatattgcaactgaatgttggggaactggaagatgcaaagaaacaacttttccacaggggaacaaaagggaaagaaatcttctttctctgttcctctgaaaaattattcttttcgtatcttctcattgtcatcattctcactcctgttgcattatccgcttgaacttaggtatcattaaaaactattattgagttttatagaaataaattgaattccaattcagcaatcaattatggtgtgctaccatatagggaaaatgaagttatggatttgcgctgttctgtcgggaagttattttctataataaatccttactgttcgatggaacaggctttattaaaaatgatagaatgagtcaagtttatatattgggagccggaatatcgggattgggtgctggttattctttacgtaagcgagggatttcttctgtgatattagagaaggatattacttatggtggattatgcggtaattttgaaatcaacggtttccgctttgaccggtttgtacatttctccttcagtaataatgaagaggtaaaccgtctgttctctttgtcttcacccaatattatccggcatattcccaatccatataatatctataagggaaattggataaaacatccggcgcagaataatctatacgcattgtcagagaaggaaaaacatcagattattgaggattttaagaaacgtcccaagaatgtagatataaatagtatacactcttatgaagaatggttacgtgttcaatatgggaattattttgctgagcatttccctatggtttatactagaaagtattggatgtgcgaagctaataatttagaaacaggatgggtagggaatagattgtaccagccttctttggaggaagtaatccaaggttccctgactcaggaaactccggtaacatactatgctaaagagatgcgctatcctgctgaagggggatttaagactttccttaatgttctggttgacgaagcgaatattaaattcaaatcagaggttgtggaaattaatactgagaagaggatgttgcgtacagtttctggagatttatatcagtatgaccgtttgattagcagccttccacttcctgaagtattgaatatgttgcaagaactgcctgaagaggtgagaagtgccggaaatcaattgaagtgtacttgcggctatcagatatcggtaggactgaaaacaaagaatatccctccttatttatggtggtacatctatgatgaagatattcttcctgcccgtgtctattcaccttccttgaagtcacccgataacgctcccggaggttgttcctcgcttcagatggaagtgtattgtaaccgtaatgaatacatgcaagaagaactgttggcgcgttcagtgggaaaacttgtttctttacacattttaaaagaagaagatatcctttttactgatatccgtttcgaaccatacgccaatgtcatttttgatcataatatttatgaagcccgtaagactgttcgtgactacctttctttccttggaattgaaacgattggaagattcggggaatgggaatatctgtggagcgaccagagtttgctgagtggattagatttgatgacatagttgtatttgctttatgacttcattaagaaaaaacatattttggaattctgtacgggtaggaagcaatttggtctttcctttggttactttcccttatgtgtcccgtgttttaggaccagatacaattggactgtttaattatgtcacagctattgcagcctattttacattatttgcttcgttgggttttcctatatatggagtacgtgaaatagcaaacgtaaaggatgaccccaaacaatttggaaatattgtagatgccatatttactgctaatgtaatagcaacttttattgtttatatagtatattctttggtgtcattattgattggtggggaatatttgttactgtattttatcataggactgtctgtattgatgagctgtatcagctttgattggttttaccaaggcatagaagattttaagtatattacagtccgaagtctgataataaaagttgtttcaatagttgggctttttatttttgttcatgacaagtctgatttacaggcttatgcgatactttcaattgtaggaacttgtggtaataatatattaaatctgatccggattaataaatatgtaaagcttcgcttttctttagttgattgttggaaacatactaggggagcttcgactttatttctaggtactatagctgtcagtctttatactaatttaaatagtattatggtaggtgctttgggaacaatggaagctgtaggattttttacaacaggcaataaaattgtgggtctggtaatgactattattacagcggtgacttctacaattattccgagaatgtcttatttagtaggtagcggtaaggaagaggaagctgttttattgcaaaagaaaaccattaacttgttaaattatatagcgttacctatgatagcaggtttagtaattttggcaaaaccgattatattggtatttagcggtaaagaatttctgccttctgttatagttctgcaaatattgtcatttttgcttatcatcattccctggtcgtcatttttaggcttgcagatactttatcctataagaaaagaaaagtatggtaattatgcagttgttactggagcattagtaaatctagtgttgaatttcattttaatcccccgatattcttatatcggggtagctatttcggtggtatgtgctgaaatggtgattactttggtacattatatttttgcaatgaggtatatgaaattaaaattccatgactttattcctatcaaatccattatttcaactctagtaatggctctagtggtctataagggcttttcttatagtgatcatattgtttgtgttgtagcttggagtatggtaggtgccttggtttatgtgggtgctttactgctaatgagagataagtttatgaaagaaatgattttcaaaataatataccgatgagaaatatattagaaataaaagataatttttccctctataaagggatcaagagcagtctgttatggggtaattctaattattgtaagagtcctaaagtatctatcatcatgccggtgtttaaccatcctgattattttcggaaatcattgagttcagcaatcaatcaagactatgcaggtgattatgaaattatagtggttgataataatgatcagactgatggaccgactagtaaccaattgattgtagaagaatttaaaagttctaaagtcttgtattacaagaatgaaaaaaatataggaatgttaggtaattggaataggggtattgaattggcaagagcaccttttgtgacttattgccatgatgatgatatgttgttaccaagtgcattatctagattgatggagcttcaaaaagaaacaggtgataaggctatattttcagcatttaacaaaatggatgatagagaaactatattttccttaagcgaatatttttctaagcgtaaattgggaatcttagtttcatgtgactgttatccttatactttatttaatcagtttattggttctgcgggatttggcgtgggatgtttgttttctaaaaaatgcctattggaaataggtggatatgatcctgaattttatccagcgtcagattatgccatgcaggcccactatacattccgttatggtagtgtctataattgtattcctacattcaactatcgtgtagcggaaaatgagtcgctaacagtttacgataagtttgcagaggtggatcgacattttagaaactgcatgaagaaacacataggtcttcccaattttgttctaaataggattataaaggcaaactataatatctccaaaattaattttgccattatttggggaaaagagaatatttcgctgcatgaaaatgttagatttggtgacaaattgataatgtacattgtatataaactagcgttatttagaagatataaattaatttgtaaatagagaaattatttaggaacaaaatttagattttaaaataaatgattttatggataaaatattgactgtcgttatacctacctacaatatggagtcttatttggaaaaatgtttagagtccgtattagttgagcagatcataggactcatagaggttatgattgtgaatgatggtagtaaggattcttctttgtcaatcgctaaaagataccaaaatagatatccaggttctattgttgttgtagataagaagaatgggaattatggttcttgccttaatttagcttttaatcttgcaaagggaaaatatattcgtactttagatgctgatgattgttttgatagtaccgagtttatcaagtttatagaaaaattgcgctttttacctaatgatgtagatctaatattgactaattttgttataaatatgattggtacaggtaaaagtaagctgattaagcagaaagggaattttgggaaaatttatagtcacattattgatttcgagaaaaatggaatactttataatattcatgcggcaacttatcggacttcaatcttacgtgacaaccatataaaattatcagagggaataagttatacagatattgaattattagtttattcattattttattgtaaaaactttgtgttatttgatatatctttgtataaatatactattggaaggcaagaacaaagtgtgtctatgtcttcttatctcaaaaatatagatcatatatctataattttacatcgtgtcgttaataactataatagttatttgtctaaattgccgactgtatataaaaatcaaattgatgctctttttcctcttatagacattttttctcgtttaattataa

SEQ ID NO: 161 - DNA, 809385 bp, Phocaeicola dorei
  source 1..809385: mol_type = genomic DNA
gttatatcatttgtcggacacaattgaaaggtttttttgatccagcatgttgggacaagacgttaaatcacattattaactgtcatccattgttacattctattctttccgaagagtcggataaacctgagatgataactcttcctgaatatccgacatttaaaagttcttatgaagatataacttcaatgaacaaagaacaacaggaaacattctttttacaaaaggacgaaaaagatcatgatcacagatttgaccttaaagagtatcctttattctattgtaatatttataaaacaggggaagatgaacatgaattaattatacatattgatcaccagataattgatggtttcagcttttttcaattccttcaagaattaacatcaacttatgatcagtttatcgctggtaaagaaataactgttgaacaagaaaaaggtctaactttttctgactatgtttttgtggagagattcagaaggcaaacaaagcgatatcagaatgcaatggattttgccctaaaggtgtttaaagatttaccagagaaaatatctattcccacgaaatgtcagccatctttaataaataaagtccattttaataccttacatacggaattggattctttattgatgaataaagttcttgaaatcagttctcatacttctggtatatgccttaattccttacttatggcatgctattttaaactgatgaatttgtggtctggacaaaatgatctcattatcaacatgcctgtatttaacagggaacagcatttacctaatgcaaaaaatataataggtagttttcttgatattttccctgtccgtatccaaacatctccacaagaaccgattgtttctattgcacgtaagatagaacaatttgtacgaaccatgcttgagtatccaatatcttcaatagaattgtccagaaaaatcgcagaacaggaaggcttaaaacaaagctctttgagtgcaattatttttagtaattctatcaatatgcttcccaaaggtatcagtcattcatctagatatttgacaattggtgcgcctaaagtacagacaggtgcacctggtacttatatagaccttgttatgtatacatgggaaaataaatggtgttttgattggaattatgttcgtgagctatttgatgcggaatacatacaactactttctgaacaattcacgtctatgcttaaccaattggtagatgatacaaacactaagggatacgaagagcgttcatgttcaaatatactccctctcttctatataaaattattggagcaaacaaataaaacagaacatgcttatcctcttaaaacaatatatgaacagatcagtaatactgtagatttgtatcctaatagagaggcgatctcttatcaaggagtttctttaacttatacagagttttggaaaaaagctaatcagatggcgcatttcttacgttctcttggagtggtacgaaattctaaggttgctttattactgaacagaacgcttgatttgcctatagtacaacttggaattcttttagcaggtggggcgtatgtgccaattgacccttcttatccttcggatagaatacagtatatgataaatgactgtggagcagaagttcttgtaactcaaggaatacatgtagacaatattaatagttcatatacccccaacattaaacattgtgtgttacttgatgatgattctattcctttacctgatacatatcgtcgatacaccgtaaatgatataaatagtcaatctatggataatatagtaccttgtaatactcctgatgatttgatttatatgatttatacttctggttcaacaggacaacctaaaggtacaatgcttaggcatagaaatgtatccaattttttgaattatgagaaagaagcgtttaatgtaaactgtaataacaggtttgctttaataacatcgtattcctttgatatgactgttacttctaattggctacctttcattgccggagcttctttacacattctttccgataatgcaactaaagatatagagaaacttctgtattttatagatgaagaaaaaatcaattttttgaatgtaactccctctcatttttcaatgttggtaaatatgttgggatttttggagagacctgtaaacctatcacccaatatgactattatgctgggtgctgaaattatcaatgtttcggatataaacaggtggttagaaaattatcctttgcacaaatttattaatgaatacggccctacagaaacaacggtggcttccactttttatcctatcccgattgaagaagacggcaaatgtcatttaaatatagttccaatagggaaaccgatttataatacacaagtatatgtattaaatgataatttagaatatacactaccagaagttcctggtatcctttatattggaggcgagggagtgtcatgtggttatttgaataaagaagagaaaacgaaatctgtatttatcaataatcctattactcatgaaggaattgtatataatacaggagacgttgtaaagatgactgtaactggcgatattgtatttgtaggacgtaaagattttcaagtaaatgtcagagggtatagaattgaattaggagaaatagagaatgctttattaaaagtatcaggtattacagaggcttgtgcagagattcaatatgatgtaaacaaacagcctgtagttgtagctttttatgttacagcaaataattgtgatttagaatacaaggatataatgtctgttctgcaaatgaagatacctcactatatgttaccttccgcaatggctagaatagagcagattccaatttctgccaatggaaaaacagacaagaagcaattacccaatattgcgaatcagaaacaaaattttgttaaaagggatattgtaggtccaaggaatgaaagggaaaaacaaataaccttaatctgggaaaaggtattagggataccagaggtaggtgtatttgataatttctgggatataggaggcgactctatccgatctgtaaggttaataaaagaattaaaggaggtcggattaaccaacatcaaattaaaagatttattcgataaacctacgatagccgaactgcttgaacaagaaatagagaataataaagttgagaatctcatttgtatgaaaaaggtttctactccatatgcaaaacttatatgtcttccatatgcagcaggaacccctggtatgtatagtacattttctggggattttaccggagaaatcaacttatatacagtacaatatccgggacatggagatggacgtgagataaagtcctctgtagaagaagttggtgcgctattagccaatgaactgaaagaggctgataaagagattcctttgtttatcatgggatattcttacagttgctatattgcttatgatatctgtaaacgatttgaacaagaaaatattccgatacagggtattataatgattggtggaactcctcctacattgcgtgatgacttaatgcaattcttttcaaatgacgataatgcccttttggattattcacgtgcaaaagatctgttgaatgaagaattgatcgcaactttatcagatgaagaaaaacatgaatatttgcatgagttgagaatgaatactgtagcaatggtaaattacaagtttcttgattgtaaattgaaaaccccattatgttccatcgtcggtagagaggatgagcctacaattcgaaacaatcaacatctatggaataattactttcagaaagtttctttccaccaattgccaggagggcatgttcttattacaaaatatcatgcggaattagctaagttgataatgaattatatagaattgcatgtataaatatgcttgtattacccttttccgatatagcagtagaaattgtggaagatagtccttttgctacttcagataatctctttaatgaggaaaaaatattcattaaaagagaatggtctgaaatacgtcttaaaacttatattttgggacgttgtgccgcacatcgtgccttacagactttacaaaaggaaatagttcccattttaaaaggaagagatggtgaaccaatatggccatttgacatagttggttctatatctcataaagatgcaatagcagttgctgctgttggaaagaaaaagaggtataagggtattggagtagatattgaagatcaaacgacgatattatcaaaaaaggaatattctcttttttgtacaccccaagagatagcgtgtatagataagaaagaattttctcctattgacattttttcacgtaaagaagctattctaaaggcatattatacagcatatagtaaattatgcaattggattgatattgacatgataaatgtatctaaagcttccaatgtaactataatatgcatgttaaaaaaaaattttattataaacctatgttgtgtagaaaagtaaaaacaattttagtcattatgggaatatgttgtttccctatgatatcttgggcacaagtttttctttctggtcgaatcgtagataaaaagacaaatgaacctgttgtaggagcttctgtatatatacgaaaaaatcaggttggagataatgcaaatgataatgggttatacagaataaaattacctcaaaacggaacgtatcttgtagaggtttcttttatcggatacaaaacaataaaacagtctgttactgtaaatagaaatacaactaaaaatttctttttggaagaaagtacagaagtgttgaatgaggtcgtggtaaaagcatcctcacagcaggcagaaataaatcatatacgtaaaagtcctatggctgtaacggttgttgatggagcaaaattaagaggtcgttcaactggaattgaagaagtacttactcgtacttctggaatcaaagttagaaaatccggaggtttgggtagctcttctaaaatgtccatacatggtctggaaggaaaaagagtagctatttatatagatggttttcctttaaatagccccgatggttcatttgatataaacgacatacctattgatgccattaaatatattgagatatataaaggaatagttcctgctgaatatggcagtgatggtctgggaggagcgattaatgttgttacaagagaggacgagtgtgacttggtaggctttactcaggagtttgcttcatttggtacttccaaaacgttagtcagtgtaaaaaaaatgtttgaaaaaccagggattcaaattggaggaggtttttttcataataaatcggataataattataaaatgacttatcctgtttttgaaacaaatttaccttcaagtgcctaccaagaagtaataagaaataatgattattataggtccacaatgtataatgtaggtttaacatttacaaaattctggtttgataagattgaattagaatgtgctttttataacaataaaaagggaattcaggccttagattttgattcacgtttttctcatacacatgggacaaacattatgcctactttaactttagagaagaagaatttcttatttaaaaaccttgaattcaagtcaggtctagtaactccaatcattcatacgcatttggttgataccgctagaacaaaacggcaatgggatggaaccataacaaatacaatgggagaaactgatgataatttattaaactattcagatgacaaacaatttgaaatcagacataaattgaatttaaaatacaagttaaagcaacatacctttaatcttaacaatcaattcacatattcaaggtatagacctaaggatgattatacagcagaatatgttggttttgaccctagtggttttcccagtaatatgaagggaaatactttggggttagcacatgagtattcttcacgtaataacaaacttcaaaactctttaatgttcagtctatactatttaaattctggaatatatagaacaagtgataaaattgtagatgaatctgaaagtgttaagaaagaaccgaaaaaaacaaaaataaacaatttttactatggaataagtgaaggaatcagttatgaatttttcaaaggggtgagaggtaaattttccttatcacataacgtgaggcttcctgatacggaagaattgtttggagacggagtgacagtaaagccttcagttgatttaaatcccgaaataagtaataatataaatttagggttaatcatggataaaagtaattttatggggttaagtcgttttcagttagagacaaatttatattatatgtatataacagatatgataagtttatttcctgctgatatacgaatgatttatacgaatttgggtaagactcagatcatggggggagattttgatttaaaaatagatgtgactccacagctttatagttattttaacttaacctatcaagatattcgggataagctaaaatggactactaatgaccaaagtgtgaaaaacccgacttatgataaacaggtacccaatattcctcgtttttattttaactatggtttagagtatcatacagagggattacttgggaaacatgaaatatctagaatctatatagacgcatcttacgttcatgattttgattggagttggcaaatgagtaacttaccagaacagcgaaagaaatggttaattcctcgtagtcatctttttacggcaggattccagcaatctatttggaaaaataaagtatcattagggtttgaagttgaaaatatattcaacaaggagagctatatggaatttaaaaagcctttacaaggtcgtacttttaaaattaaattacgatttaattggtttggtgatgaatcttcagggggagcgatgagtttgtaatattataaataattattttaactaaaaaaataaaaaaaatgaaaaatcaatggtttttattgtcgctattagcgacctttttaagttttatttcatgtagtaaagatgatccgtttccaacagatgaagaagacgatatgagttttgttcatagtgtcacggtgggtgataatgcttatgttagtctatttaaagatttaaatgtagaacagacaagtacacaaaattctttggtctttgcaaaagaatcttttctttttacttatgggggtaacatttatgtcttagaatcgatgaatgcccgtttatataagtacagagtcgagaatggtttgctaattcaagaaaaagaaacgatgattctcccttccggttctcttcctacattccttacatttgattcagaagaaaaagcttatatatcatgcgtaggattgggaaaattgtatataataaatcctacgacaatgcaaaaaacaggtgaaatagatttatctgaatatgcaattgggaaagaaagtggtgataaaaatcctgaacctggtgcttcggttattagagatggtattttatatgtaggattagctcaagataagtcccagtttaaccctaatactggagcttatgtacttttgattgatacaaagacagacaagcctattaaaccttaattccgcaacactattacaaatataactttttaagtacctgagcaacaaaaagttgctcaggaatttgccatgtcagatttttcacctatcttagtgttgcaaatcaaaatatgtatcaaacccgacagacatggcaaaggtagcaattaaatccgagaaactcactccttttggaggaatattttcaataatggagcaatttgactccagactctcatctgtaatcgactcaaccctcggtatgagatgcaggctgtatggttatcaatacagcgaaatcatccgttcgcttatgagcgtttatttttgtggcggctcatgcatcgaggatgtcaccactcatctgatgtaccacctttcgcttcatccgacacttcgcacatgcagtgccgacacgattcttagagccataaaggaactgacccaggataacatttcctacacatccgacactggcaagacctacgacttcaacacggcagacaagctgaatacactgctcctcaattgcctattgtccacagggcagctgaaagagggcgaggggtatgacgttgacttcgaccaccagttcatagaggctgagaagtttgatgcgaagcctacatacaagaagttccttggttatcgccctggcgtggcggttattggcaacttgattgtcggcattgagaacagcgacggcaacacaaatgtccgtttccaccagaaggacacgctgaagaggttctttgaaaggtttgaacaaaacaagcttattatcaaccgtttcagagctgattgcggctcgtgttctgaagagatagtggaagagattgctaaacactgcaagaccttctatatccgtgctaaccgatgcagttcgctctacaatgacatctttgccctcagaggttggaagaaagtggaattgggcggcattgagtttgagctggcctccattctcatcgagaaatggaaagggaaggcataccgtcttgtgattcaaagacagaagcggatagacggcgaactcgacctgtgggaaggagaatacacctaccgctgcatccttacaaatgactacgagtcttccgagaaagagattgtcgaattctataacctccgtggagggaaggaacgcatcttcgatgatatgaataacggattcggctggaacaggcttccaaaatcctttatgggagaaaacacggtgtttcttctgcttatggcactcatacgcaacttctataaattcatcatggcgaggcttgacgtgaagaggttcggactcaaagcaacaagccgcatcaagacgtttgtctttaagttcatctctgtgccagccaaatgggtcaggacatcaaggaagtatgtgctgaatatctattcatgcaacaatgcttatgccaatgtgttccagaatgactttggataacaccgacaacttatagtcgtgattttgcgtattgcctcaagtcgcatggtggggtaaggggcatttatatgtctttatggtgacattcgatgcactgtgccccctttttactaacgatgcagattcttttcgcttctgtatcatattaggcgcgtagttgcggatttgaggttaaaatgatatctgataatagagctacaatggcaaccgcttatgagtattcaggtgatcctttcattgatgaaaaaggcgatctttatatttattgtgtaggaggcttcggatattttgcaaactgtacagaaggtttcttgcgtataaagaaaggagaaacagactttgatcagtcatactatttcccaatagaaacaattagtataccggacataaagggtaataaagcaaattatatttatagcaaaacatatacaggaaatggtaagctatatggatatttcaatgttccgggatatgttagtaatccacctgattatgtaaatgacaaatcaatgcaaacatttgaaatagatgtttataataaaactgtcaaaaaaatgaactttgacggaactacgggttggtcatgtagtcaatgtaaagcaggagactatatggtgttcgggatggcttctactcaaggaacaggttattatctttacaactataaagaagataagtatgaacctttaaagataaaaacagaaggtaatcccttcaaaattcaatatttaaaataaataaagactgccggaagctaaaagattccggcagctttttaatttttatggacactgtccaaaattttgtgtaaatggaaacaggattcagctgtaagtttgttcttatatctggattctgttttcaaaaataagcataaattgattcataatcaagccccagttatgaatcggctgtgtccatttcttctcaatctccataagtgaaagataaacggtctttttgactgcatcatccgaagggaatgaaagctttgatttcgtgtactttctgatttttccgttcaggttttcaatgagattggttgtgtagattatttttctgatttccagcgggaactggaagaaaacagtcaaatcatcccagttgtttctccatgaaagtatagcataaggatactttcctccccatttcttttccagattgtcaagttctgtggctgcaacctctttgttgggtgcattatagatattcttcatatctgccgtaaactctttcttatctttataaaccacatatttacaggagtttctgatctgatgtaccacacagatttgagtggatgactgagggaatatactgcggatagtatccgtaaatccattcagattgtcagtacaggtaatcaggatatcctgcaccccacgggcttttaaatcagtcaggacacccatccagaaagaagagctttccgatttgccaacccacatgccaaggacttccttcagaccgttctgtttcagtccgacgcaaaggtaaacggtcttgtttatgatcttaccgttatcccgtaccttgaagacaataccatccatccagactatcaggtaaacaggatcaaggggacggttctgccactcctgggcagcctgattgaccttgttggtaatgatggaaatggcagatgtagagagctctatttcataaatctcacgcatctcttcctctatgtcagaaacgctcattcctttggcatatagggagataacgagcttttctatagaaagtccacggctttcatgtttaggcactgctatcggctcaaactggccgttacggtcacgtggaatagaaatgacagactctccatgttcggtttggattttcttcggataactgccatttcgggagttgccagtgttatttcctatcacagaattcttttcatatcccaaatgggcatccatttcaccttcaagcatcttttccaatacttgggcatgcaactgcttcagaaacttgctcacatcggcttctgtcttgaactgactgataaacttgcttaaaacctcatcaggcactacttgattcttttctttcataagcttcttcattttgcaaatgtataaaataaaaaatacgagactcatttctgaatcccgtatttccatttacacaaaatattttatagtgcctttttatggaatgaacaatcgtaattatgactgtataatcattataagtgtaatctcaggtttatttatcacaacctgcgactatctagtacagatgaaaactgttgaaacagattattttgtttcaagactactttctttagaagaaactattttaaatttatcatcttttggatgtatttttacttttcctttttggatattagggacatacttcatatacacaacaatgtgtaaagttaataaaaagcttgcgcttattaatacattctgtatatcttattctttattgatgttggggttttatcattacagctatgccataatatatagtattggtacatcaaaaatgataatgcaaacaaatatagattggcaattattaacaggatctaatataccttttttcccctttatgtttattctacttccagtgacctggctgattgttggatttagtaacttttcatccaaagctatagttcctcgatggtctatagttgtgaaccctgttatactaacaattattttatctattgtcacttggataattcccaagaccgaatgcttactaccaggcatttttagtttggggatcactctgtattatataatttgttggataagcttaaaaaaagatagaaatttatgtctaaaaagaaagttttagtaattggtggcacagggattgcgggacaatttattacagattacttgctacattatcatgatatttgtgaattatttatagcatcaagaggtattcataagatatcagagaagaaagtaaagttcataaaaatggacatacatgatacccaaaatatagaatctgttattaaacaatttgatattataattttggcacttggtcctttttcatgtgtaggaacagatatttatacaatttgtttaagaaatcacgtaatatgtgttgatattaatgatgactatggacatagtggacgtgtactagaaataaaaaatgagaacataacaaattttcggggaacaatttttacaggaatgggattatgtccagggttgacaactttcatgctagaatatgctgcagaacaattaaaaaaaactgttttagaagccgaattgagaatctattttggagcaggtgttgtttctggaacagcttcaataatcaatatgtttgagggttttaaagatgacctgatgctcctttcagaaagggaaatccgaagaataaaaccaactaaatatcattcagatagaacttttacttttgatcgttttcattccaatatgccattaatattcttttctagtcctgaaataaggactatacaacgagctagtcgatttgaagaactacaaaattttgattgtgcttttcatctgcaaaatcttcctatgggcatagttcccttactaagaaagagctcttttattagaaaattgatttgtaaaatggtcaataaacaacaggggcaattggagaaaaatgagaaaaacgagaaatctgtgatagtatgtacttatgtaagaaatcaaaattctattgtaaaatgtttattgcactcagattcctcatttagattaacaggagtattttgtgcggtaattgtgctctcgataataaaaggatgtataccaattatgcctggcatctttacttttgaagacataaatatcaatctgcacatgttaaacgaaatattaaaaaacaacaacataaatatatctatagaggaatagtattatggtttataataaatatataggaataataggtggaactggaacaattggttctattatagttaaatatttattacaactacaaactcacttccatgttttaattggtggtaggagatccataaaagaaatatctatgtctacattttataatagtgagcgacttaagtataaccaaatgaactataacaatgatgtagaattggataatttttgttctcaatgtttgttggttattaatgctgttggaccttcatttaaaataaatgacaagattgccttacatgcattaagaaataattgccactacatcgatataggaggatatggcattttgcgtgatttattaaaaccatatgaaaaaagcattgaagctcagaaactttgctttattataggtgttggttggatgcctggtatttcaggcgtattttctaaaactattatagagactcatttaaacagcccagaaaatactaattttaatatctattatggtgctgttgataattggtcatatagttcaacttatgatctggcagcatcatctatgggaaaaacacgttcctatgtttattctcatggaaaggaaatacaggtgtctccttttcgatatacacatcacaaattttttcctttcattggacataaaaaaatatgtatgccatcatttgacgaacaattaactcaattggctacttctttaaaacaaataagaaagatatcaacattcattatgctaaatgactatatctcaatggggaagtttatgtttataaagatcttttataaacataatttaaataaagcaacacttatgttgcaagatgattatcaacgtctcgttaagaaagagaataagtggggaagtgtaatttgtcaagtttctaaaatagagccagaaagaaagatagataccttttactatttatatacaaaaaataatttattatatactgcattacctgctgttattactactcaatacattttagaaggtaaaacaaaaataggattaaattgtctttgtgactctttgaattgccaatcttttatgtcggatttagacttttacggaataaaatattcatattatgaacataaaaattaaaaagaaaattcttgtgtgtatgttgtggttatgtgccatagcatgtttcactggttttccctggatatttttctcatgggatgtaattcactcttacatgggaatccatgatataccatcagacttgacaattgtcttgtttcgagaagaatgtttgttcttcggttttttctgtatttattttctctttcttagaaatatcgaaaaatataaaggacttattagcttctgttctttcttagtcgcatttatgggtggttttatgtacttgctaaaacttcaaacagggattgtacatatatcatcagattatgaaccttttatttggcttataattggaagtttcatattttatttaaatcatagtattaatggtatagcaccaaagaaacaaaaacttcccgttttaagttgtttattccaagtgcaggcaggagtattgctattgaacattgtaaatattttagtccccgaacagacttggaaaataatgttcaatatttcttattctacagtttcaccttatgataaatatacatttggaatgataagtggttttactgctttctcttctattattatatattatatcagtaataggattcttttttttatgaatttatctaaagcgattctcattttctcttttctttatttcttaggtttctttgtgtggggaaactttagtgagttgtataaacctctatttattttatatgtagtattagttgagattttaaatattgtaggaattaattatatatttaaaaggaggatatatgagaaataaagaagggctagtcgatgatttgataacatcaattccaggagaatggaaatttgatgaacaagtatcacaacatttcgacactcatgtaagaaaaagtgtcccattgtacgaggaagtacaaaaggctgttatcgaaataagtgaatggtttattagagacaatagtgttgtatatgatttaggttcctctacaggagaaaccatttctcttttattacaaaagcattcaagaaaaaagaatgtgagattcatcggagtcgaagaaagtttaccaatgatagagattgcaagaaaaaaatgtagtagcgaattagttcaatttctacaacaacatatagaggaaataaatgaatttgctaatatagatttagttttatcattgtatacgttacagtttttacctttatggaaaagaaaaaaagtcttacaacggatatataatggattagtagaaggtggagcttttatatttgtagagaaaataagggcggaaaattcactgtttgaggatatatggaatgacttgtattgggattttaagcaagaaaatggtttgaatgaacaacaagttataaaaaaggctcaaagtttgagaggcgttttgattccattgagtcttacagagaatttgagtctactatctgatgtcggttttcaatgtatggatactttcattaaatggcacaattttgcaggaattatagctgtaaaaatgccttcgaaaaatgatatagaagaaaatacttatttaaatacagataaaaataataaaatacagcaatgaatacaaagttgataattcacatagtaattagtttgatctcattaagtggattaattgtttattattacgcatttctactaggttacaaaaaacataattctcaattaaaaaaacaatcaaagcttccggaaaagttatattttatgagcacttatccagcactcatatggtatgtattaccctttatagagcaaccaaggatgcatggaatatatgactggttaaatggcgaatttgttttttttaatgttttgtatattccagtttcttttctgttgtttgtatatttctttggcatttggggtaaaaagtctgtttctcaaaatattgaagctactaaaagtgcattttatgccccaagtaaattgttaacagaaggaatatatgcaagagttcaacatccaatgatcataggggatatattaggacatttttctttggtgttattaacaggtggaatctacacttgcattttattccctatatatgtatttatagatctctttatgataaaaatacaggttaagtattctttagaaccatattataaatcagaacttatagtttatagaaagaaaacccctgttctccttgatcaaaaactattatttatagttttatttatggcattgttggttatttgtaattttttaaattatacaaaaataatccttaattccgcaacactattacaaatataactttttaagtacctgagcaacaaaaagttgctcaggaatttgccatgtcagatttttcacctatcttagtgttgcaaatcaaaatatgtatcaaacccgacagacatggcaaaggtagcaattaaatccgagaaactcactccttttggaggaatattttcaataatggagcaatttgactccagactctcatctgtaatcgactcaaccctcggtatgagatgcaggctgtatggttatcaatacagcgaaatcatccgttcgcttatgagcgtttatttttgtggcggctcatgcatcgaggatgtcaccactcatctgatgtaccacctttcgcttcatccgacacttcgcacatgcagtgccgacacgattcttagagccataaaggaactgacccaggataacatttcctacacatccgacactggcaagacctacgacttcaacacggcagacaagctgaatacactgctcctcaattgcctattgtccacagggcagctgaaagagggcgaggggtatgacgttgacttcgaccaccagttcatagaggctgagaagtttgatgcgaagcctacatacaagaagttccttggttatcgccctggcgtggcggttattggcaacttgattgtcggcattgagaacagcgacggcaacacaaatgtccgtttccaccagaaggacacgctgaagaggttctttgaaaggtttgaacaaaacaagcttattatcaaccgtttcagagctgattgcggctcgtgttctgaagagatagtggaagagattgctaaacactgcaagaccttctatatccgtgctaaccgatgcagttcgctctacaatgacatctttgccctcagaggttggaagaaagtggaattgggcggcattgagtttgagctggcctccattctcatcgagaaatggaaagggaaggcataccgtcttgtgattcaaagacagaagcggatagacggcgaactcgacctgtgggaaggagaatacacctaccgctgcatccttacaaatgactacgagtcttccgagaaagagattgtcgaattctataacctccgtggagggaaggaacgcatcttcgatgatatgaataacggattcggctggaacaggcttccaaaatcctttatgggagaaaacacggtgtttcttctgcttatggcactcatacgcaacttctataaattcatcatggcgaggcttgacgtgaagaggttcggactcaaagcaacaagccgcatcaagacgtttgtctttaagttcatctctgtgccagccaaatgggtcaggacatcaaggaagtatgtgctgaatatctattcatgcaacaatgcttatgccaatgtgttccagaatgactttggataacaccgacaacttatagtcgtgattttgcgtattgcctcaagtcgcatggtggggtaaggggcatttatatgtctttatggtgacattcgatgcactgtgccccctttttactaacgatgcagattcttttcgcttctgtatcatattaggcgcgtagttgcggatttgaggataatatgatttattttagctgggccacccaaattattttggccataatttcatttctttggttgattccttattatatagcatttaaggttgggaatcgtaaatatatgtctaaaacactagatttatcttgcaataatagatatacattaatgtattattcgggcttttttatatctattctttggtatattatgcccttcttaaatcaacctcgcttcaaactaaacattttttctttgtttgacataaaagtaatactgttggaaaatgttctttacaatattatccttattgcattaattggatattttatgtctgtttggggtactaaagtggtaaattgtaatctgcaagcaaccaaagataggtttttgcatccttcaaagttaataacggaaggtccctataaaaaagtgagaaatccgatgataatgggagatctattttgtcatttaagttttattcttctgcttggagccatacatacattatgtttatatataatttatatatgtattaatcttgtaattgtatatatagaaaataaatattcattatgtatacatttcaagaaagaatatgaagaatatgctaaaaaaactccagcttatatgaatcaggaattatggctgtttgctattttttacttggtaattattgtgacaaatatttgtctaactacgacaatatatatttaaataaataatgaagaaaaaagaaggattatctaggttactggaaattgcgggagaaaaaaaaagtttattgcttttctccgggttattttccgctataagtgcattatgtatacttataccattttggtctatatatgaaatattaaaggaattgcttgttcatgcttctgatttatctacgatagattctgagctaatgatcagttgggggtggcttgcttttattgctttgattgtgggtgtactatttttgtatgcgggattaatgttatctcacatagccgcctttcgtattttatatgggttaaaaataaaactttcagagcatataggtcagttgtctttgggatatttaaattcgacatctatcggttgtataaagaaaatcatggaacaaaatgtcgaaaaaatagagcattttatagctcacactattcccgatttggtgaatgtgtttgcaaccataacttttatgtttattatctttttttctttaaatggttggatggcattcaccgctctattatgcatacttttaagtataggaatgcaattttctaattttgtagggaaaagagctactgcacttacgaaaatctattttgatgtccaagaacgcatgagtgcttcagctgttcaatatgtgagaggtatgccaattataaagatatttggacaaagtatacgttcttttcggcagttcaatgccgaaatcgaagcgtataaaacatttgctttaaaatgctgtaataactatcaaaatggtataattgcatttattattctgttgaattcaatagtcacgtttattcttcctgtaggaatattaataatgacctctgatcctaaaaacatctcattagctgcaatttatctttttttcatcgtgatggggcccggagtagcttcccctgtatataaactcgcatttttagcttcaggaactgtagaaattaatgaaggagtaaaacgtatagacaaaatatttgaggaaaaaaaactatgtgaaccagttgttcctcaaatacctcagacgtatgatattgaattcagaaatgtaagttttgcttacgaagatagagaaaatatgacaaagacagaagcgctgaaggatatctcttttatcgctcgacaaggtgaagtaacagctctggttggaccttctgggtcagggaagtcaacaatagccaatctcattcctcgcttttgggatgtttcctctggagagattttaatagggggaataaacataaaaaatatttcctcaccccaattattggagatcgtgtcttttgtattccaagatacgtttcttttcaatgataccatatatgccaatattacagcaggaaatactcaagctagtttatcggatgttatacaagctgctcaagctgcccaatgtgatgattttattcgaagtcttcctaaaggatatgatacgattgtcggagagagaggcgtttttctttctggaggagaggcacaacgaatttgtatagctagggctattttacgaaattctcctattttagtattagatgaagcaacagcttttgctgacccagaaaatgaatataaaatacaacaggccttacaaaagttaataaaaggtaaaactgttattatcatagctcatagattgtcttctatcacctctgctcatcaaattcttgtttttaaggaaggatgtttagttcaaaaaggaagacatgacgaacttcatgttactacaggcatatataaaaatatgtggaatgcttatataaatgcacataactggaagttaaatctaaaaaaatgaaataatatgattacaaaggctataaaacatattactataggacaaaccaaacgtttatacaagcctgtggggtatacaatgcttgcaaactttataaatatagttcccttttgtctttcaatagaagttataaataccctttttaaagcttttgatggaactggaactcctctaaacatatctaaattatgggggctgattgtgataatgtttgtatacataatttttatgatttttggagaaaagaaatcctataatgcaaatttccgggaagcatacaatattagtgcagaaggtcgtattgctttagccgaacatttacgcaagttgtcattaggttttctttataaaaaagattctggagaattatcttccatgttaataactgattttgctatgacagaacaagggatgtcgcaccatcttcctcaattgcttggtgcactggtcatgcctatttttgcttttttaggtttattgttcgtagattggcagatgtctattgctatgtttttatcccttcctatttcttttttaatacttattttcacttctagtattcaaaagaaactagggcaaactcaaattctggctaaaatacgtgccagtagcagaatggaagaatatttacaaggtatacgtgttatcaaagcatataatatgactggaataaagttcatccgtttacaggaagcatttaatgatctcaaacgtgcgaatatcaaaacagaagctctgattggacctattgtcatgttgtctgtaacccttcttcgtatgggacttactttgatgatattatgtggtacataccttttaattggaggaaaactttctgttgctatttttgtgatgttccttatcgttggctccagagtttttgacccactaacattagcactaatcaatcttgcagaattccgttattattctattgcaggtgaacgtattttgaatttactaaatgaaccagaaatgtcaggaacacaagatgctccggaacaaggagatattatatttagaaatgtatcttttgggtataatgataaatatatcctacatgatataagtgttacaatgaaacaaggttctttaactgctatagttgggccttctggaagtggaaaaagtacattgatgaaactttgcgctcggttttatgatcctgataaaggtgtaatattattaggtaacaaaaatatacgagagattgatcctgagaaacttatgcaacgcatttcaatggtatttcaggacgtatatttatttcaggataccataaagaataatattcgatttggtaaagagaatgctacagataatgagataatagaggcggctaaaaaagctcaatgtcatgattttataatacatttacctcaaggatatgatacaatgataggtgaaggtggatgtaccttatctggaggagaaaaacagagaatctcaattgcacgtgctatattaaaagatgctcctgtaattttattagatgaagcaacagcttctttagatccagaaaatgaagtggaaatacagtatgcaatcaattctttaatacaaggtagaactgttatagttatagcgcataaactaaaaacaataagtgatgctgataaaattattgttttagatggtggaaatattatagaacaagggacacatgaacaattattaaaagatgagggattatatgctcatttatgggatattcaagaaaaatcctgtaattggaaagtaaatgtatagagatggcataaggaaaatcaaagccgactccggagctttttggggggaggcggtttggcggcgtttccgccgttaaaccgtcctgttttcgtttaacgaaaagacaacttgctgtttgcaggagcagaccacgtttatccaataattattgtgtatcagcccattgtatggctattctcctgtgattttcggggcatttccatcaaatatttgccgacagctctccccattaaagggtggatatctctccataattatgtgacttacgctcataattcaggaataaggagacgaatatacgggaaatctgtcctttatataccctattgtccattaatggattgttactttcacacatctacaaatggagagtggcagtgagtcgtatatgcttcatggtttttctgcattatctccattaatgcgtacatttgtttatattcaaatgagagcatttgctacaacgtacaaataaattatatcattgttgcttttttgttatccattctaataaagtaagaattaattcgcttatttataatgtgataatgtgtttagtaggttagtagcccaccaaccgattcggaacaccacgagggcaatcagcatgataattttgtctatccccacgatgacacctgccgtcaaagacgtgaaccacaacttcgccgcatccttttccatgttcgtcacttcgtccacaccggtctgctccattgtcgcctctatcagattgggatcggatgtgcctgtgtgggcgacatccgcctgtgcctgcaggttcgtgtacatcgtgtcacgcacatggatgagctgctgaacttcctcgaacctgtccgatatctgtgaagcttcggcttcatacaggtcatgggtgtacgaacctatgcagttagggatgtaggacaggaaatcgagaaaacaccagttgttccggctccccgccatacccgtgtccgcaggcggataccaccagcagatgataatcgacacggcaagcggcctaaacagcttcatcacgtccaacggctcgtgctttaccatcatcttgtaggcgatacctgccgccatgacgatggagaacagtgccgcgagtgccatgcacatctgcaatatccaccaaaaaggtccctgcgcaccggtaaaagtcgcgtcagtcagaaactcgttggtctgaaagatgacatcatctatttcctcctccaacaggttgatgccgaaatccgaaagtatatctccgtttgccatagccctgtctttttatttccctctgtttacactctcgttgtcatcttcgccgtttccgttgctgcccgattgcgaaccacgcaccgcaaggcgtgattcctgccaccggctcatggcattgcggacaataccgcctttatgcagggtacggttgtccgttgcgttcagcagtgcattcgtcaccgttgcgttctgacgcttggcaaggtagcccactaaaatctcgttctgccgtgccacatcctcgtaaatgcgcagatactccttctttcgctgggtattgggcatataggcgtctttcgtggctttgatggcacactgatagacgtggtagtattccgtccaccgttccttgtcggccggagtgccaccggacaggagaatacggtcgatgttgcgccggaaccgctccatctgtccgctgaccttatcgccctcggcaagccatgcgatgtccacctgccggtcggcaacgttcaacgcctcgaccttcgcccgcttgaccaaggccgaatcaatggcttccgcttcgtccacctggttgtagagattgataccggcaagcgtgcggaacgagagcttgtttttggccgctgccgacttcttgtatttgttgtgcagcacggaataatagaggtcgggcgagagtgcgcccgtaccggtctccatgaccgttacctgattctgcttcggcgaatcatggttgtacgttacatactgtgcgtgtacggctgtcgttacggtgaccgccaccgccatgagtaatagttttctgttcatattcttctctttttgtcgttaataatccagtcttccggctccgcgccaacgcccgaaggcgtcatcgagaatctcccgcatggtgcgggagcgatatacctttgccttccaatagccgatacgcacctgtatataccgccatgtctcgaaatacgcacggttcagatgccgctcgatgttgtccaatgagcggttgatggcctccaacaccatcagcaggtcggaggtcgagcaggctgccgctccggtggcatacagcacgaggtcgctcacggacttgtagagctgttccccctcacgggcaatcgccctcagccccctcgcattgatggagataatcagggtatctgcggattcgatgcgtccccgtttcaatatcttcgcattgaaatcctccaacaatgatttatagtcgccgatacggtcgctgaccgatgtgtaggtattcttgacgttcagcaccgtgcgcaacgactggtacatgacgtcgatgacatcgaacgcacgggtgtaccggtcaaggtcgatattcagctctttatagcccccgacttccttacagctgtattcgtgcaacagtttgttgctgtactccaaggtactgcgggccaacaacaggctgcgctgcttcttgtggtcgttgatgtaggcttcgacggagactatatcgaaagtccactgcgccttggcgataccgggcagcaggaagagcagcaatgcggctatccgtaaaatgcgtttcatggccgcacctcctttccgccgtttctgccgccatcgttccgaaacgtccgtgcgctctccacccagcggtcatggcattcctccacgagcgtcagcctgcggccttcgtccgtgtccagtccgggcaacacatccttcatcacgtcaaggatgctccgcttgtagtgcatcatcttttccagcgataccaagtcggcgtatatccttgtgattctgctgtccacctccctcgcgatttcgaggcggtcgctcgaccacagcagatggtacacgtcgccggacggagtttcctccagcggtgtgctgcgggcgtattccgtcgtgattttgcaggacgggtgttcacgggcgatttcggcgatgcggtcgttcactaatttggttttctccgcatccgaaagccccggatcgagtgtcagcacatcggcgacgtgcgtgtccgtatagaccgaggtcagttcccattggatttggatgatggcacggtgaatcttgatgccgagaaaatatttcggcttgcgggcaatcgagaccgtagccttgaatgtgatgatgccgttgatgttcggcattgtcgccttgcgcacatacgaatagccgttccacgatccgccgtcctgccatgtcaggccgtaggcagccttgcagtcttgcatgatagctggaatgcggtaatagtcatccgtcgctacgctgttgtcgtctgcggcttccgacttcgcctgagcatagtcggactgtttcttcttccactccgcgagttcgcctttcagacggtctatccgtgtcttgtttgcattatactgctgtcggtaagccgccgcatcctcaatgctcgccgtactgattttcttcagcaggacagcgttctcgttttccaatgtcccgatttgcgcttcaagattggccgcttggctgtttgcctcgttcaacagcgcatccagttccgaaaggtcgaggttgttttccgtcaccgaggtctgcatggcgcactccttggtgtgggcattcaacgagctgccgcatttacggcacttgtattgtgtcgagccctgtccgagcgtaaccccgtcggaacaggtcacgctgatggtcacgctctcgcatcccttcaatttggcggcgtccgttgcttggtaatagttccgcgtaccggaagatatataataggtgtagccgtcctcgttttcgttgaactccgcaagtcggacattcagttgcgcccgaaacgtattcaagtccatcgagtaggaatcgaagacttcctcatagacaacttcttccttattccagcttttgctcacatggatttcgtatgcgtatgcctttttggtctgcttgtttttcttgctgatgatataggcactcatccaatagttgatgctgtagctgaacccgtcgttctggttgttcaactgctgcacgcggtttcttgaccaaccggcatatccttccgagttggcaagtacctgttcccgttgcgaggcgttgggatagaaattcgggtcgctcgtgttgaaccgcacccatgcgcccccgttcaggatgctgttgtcgtccgtcggaggatagtagtcgcacagcgatacgctcccttggtcacgccgggcaatgtaccaccgctgcgtgtaatagttccccatcgcttcgtccaggtagtcggtcatccatgccgtgaggttgtagttgctgaagttgaacagaccggccacgttgtccggaccacccaccatgtcaatcagcaagccgccgatgtcatgttccgcctgctcgaatagactcccgtagtgttcatacaggttgccgatttcttcaacctttccgcccatcaggtcatggaacgagctgctttgcaacagggcgtcaccgagattggcaatgcctgccgttgcaaggccgacacccgtgttataaaggttgtcgaggtcgcttttcaggttctcgtgcgtgaagttgcccggtatgtgggcgaagttgtccatcatccgctgccagtcgatgtttcccgtttcggagagctttagcaagggggcaatctccggattgatttcgagaaaggcgatgtccgaaaaggtcagcgtgctgttggtcaccacgctctcgaactgcatacacagacttttggtatcgtcgcagactttcatcaggtaactgccccaatagatagccgtttgcggcgaatggagcatctgcttcgccaccacccatatcttgggcatgattttctccgccaccatccggtagatgcgccggtagtagtagttctccgtgcggctgttccagatgccgaggtcgctcagggctttatgctccaagaacttggccgcgaatatcccggcggtagcgacctccgctgccgtgtagtgcttgaggatgtcatcgacctgctcccggtagtacccttcggcgaccgcttccgtaccgaaggcggccaccatcgccgcaacggtacgggtgtcgtagttcacgctgtaatactgggcgtgaaccgtctggcagagtgcgaccgaggcgatggtcaggataaggagtagtcgtttcatggctgcaatgcttatttggattcatacacgggacggaggttgagcacacgccccgtctcgtttactttttgtgcaaaaggcagggacttcccgataccgctggcatcccagtcccggcaatatgcctcgatagcttcctggtggctgcaccgaagttccttcttgtaaagcttcagtgcctccttttccgcccgttcggtcgtgtaggtcatgtagcactcgtgcggctcttccacgccatacacgccgctggtcgtcccccggcggatgaacacttcgcggaagaagctgcgcccatccttgttctccaagcggttgatggtaaatatcttcttgcaatccacctcggtcagaccaagaatctttcggatttcgtcaaagcgttccttgaacttgctttgatccagcagcatcaccacgtccgagttgttgatgatggcctccttcacgatttcgctgccgatgatgtcctgtatctcctgcgtcaccacgccaacagaagcccaaaatttacgggcggtcttgtacatgaacttgatgtattccgccatgagcgggctggcaatggccttccacgcttcctcgatgacaaggactttacggttcttcttgatgcgcattttctgcaggaacacgtccatgataatcagtgtgacaatgggaaacagtttcttattttccttgattgcatccacttcaaagacaatgaatgtctcgtcaaacagtgccgaatccactgtctcgttgagaattttctcatacgcaccgcccttgtagaacggctgcagcatggtcgaataggtcgagtagctgattgtcgtgatgtcgttttcggtgcagatctgctccagacggtcgaatgagtagtcaaagaatgagttgaaactcagctccgtcactttgagggccgcccgccgtgcctcaagcacctctatctgtttgcgcaccatctcatccacctctctgggtggtttgtttgggttctttcggctggccgccgcaaacaggtttttcagcagtacctcccgttgctcgtcggtgtatcttgtaaatccgttgaaataggcatcatagtagtctatgattatctgctcgacaatgcggaactcaatttcggggatttggctgtccgaccctttccaaatcatcaggataaggttcttgaggaagtctatcttctcgatgttgtattcctcccggttgatgcgaaacggattcatcgtgataggccgttcttcggtatagctgatatacttgccgcccagatactcgcacagtccctcgtatgagtttcccgtatcgaccatgaccacatccgttccctgctcatggagctggcgcacgaccgagttgatatgaaagctcttgccactcccagaaggccccagacaaaagaaattcgagttgtccgtcagcttgttctttccctcttttcccgtgatgtcaatagccaccggcacaccctgacggtcggtgtagtaaatcttcagcggtgtttcctcgctgtgcagcacgcgctccttgtacatcaggcacatcgccgcatcggaaagggtcaggaaacggtcgtattcctcattgagcgtgtagcagttgcccggaaacgaaccgacgaacagttccagttggttgtacgcccgcttgctgatatggatgcccatgcgcccgaatgcgttttccaagtggttcgtacacttttgcaggtctgcaccggcagatacggctaccaccatgttgaagtgcgtatataccagttgcttgctttcacgggcaatgacctcctgcacacgcttgatgtcctcgaccgccatctggttgttcgggttcggaatactcgcgtggcggttcttctttttgtcgagcatcgccagttcccgtttttggttgggtaggaagatgacttggttatagaccaccgtctcggcgtccggtatgttgtccaccaccgaagccagatcgaccggcatttccgtgttgttcacctcgatgttcgtgtacggacgtatcatcgagggcagtgcggcacagtccacgtccacaaggctgtacaccttgcagcgtttgtcgcccatcgacaccgtttcatcgtccgccttgaagttcgtcatcgacacggtgcggtctttgaagttcatggcgaagtagcggtcgacatactcgctcgcctcggctttgttcaggaacctggcctgtacgccgctgtcatgcagttggtcatgcaccttgcggattttcacgaggaaatcgcgccacttcttgttgtcgaacgagaacaggcggctctttttcgcctcctgcgtgatggtcaggtagcaaaggctgtccgtgtagggacgccctttgaagtagcggaaatacgacgccgacaggaactcctgcccgtcagccggttcgcttgcaaactgtttcctgacgaagatatcctgcttgtggatggcgtacccttcgcctaaggtctgcgcaagggcggtgaacaggtgcgtgaagtcgtagtagctatctatgtccgccgaatatttctgtaccggattctctatcttaagtacggcggaatattcgccggtcttggtgtacagcacacccacaccgtccgtttcctccgctgagaaatagatgtcctgaaagattcgcttgcgcttgccgcccgtaccgaacgcatagaccgacaaggccatacccgcgcacaaagcgacaaaacataaaatgatgtatagggtcatttcgatatacgtgtaattaaataggggcaggttcgccttgcttcaagacaaacccgcccgcgttcaacaatcaataaagccatgcacattgccgtgatggtttttctttcgtcagatcttgcgcgagtgggcatacacatacacacccggagcgaccttcttgctatgcagtcctttccgctgtttgagaaggatgagcacgataccgaccgatacgacggtagccagcacgacaagcccggcaatgaaaccgagcaggcagtaggcggcgacaaagccgacaatggctccgcacgtcgtcaccgccgcccaatatatgtaccggccttggatgcccaaaaactcaagaggccgttgcagtcccttgaacagcggatagtccggatagcgttcgtccttgcttttcatacttatccttgatgtttaagcggcaataccgaagaacagaggcaacgccttggccgccgcaatgaggaagatacatgctcccacgaccatcataatcttcttcttgacgtcctgctcctcgttgttcatggcgatatataccgagattgcacccacgatggccacaacgccggcaatggcgtagcacaatttcaccataataggcacatacttggcaatctcatcggcgacagtggataatgcgctcgtaccggcggaatagtcgcctgcggagttctgcgctttcgccaccatgccggacagcagcatgaaggagaacatcattactttggtagggattccgttgacgaatccgaatgccttgcggcacagctgtttggttttctgaaacatacgtttacttttttagtgaatattttatttgtctgcgacctgatacaagtaaggttatatgcggtagccgaagaaagccgggaaaacatagaatgccccgatcaggaacaggcacgcgccgacaagcgtcattatcgacttggtgatgccgtcctcgcccgtgttcatcttgatgtatatctgacaaacggacacgatgacgtaaaccccggctatggtgcaacagatatactggacatagagcatcatcgtcaccacgaagtcgtgcatcgtggccaacgcgtccgctccccagctatagttcacgctgccgcttttggcaaaagccgtgtaggggaacgggaggcacagcgcacatagaatctttttagctttcgacatctcacaaccggtcttgaattgggttccactttatttccggtcggttgtctaaccgtcccttggaaatcatagccttgtacatctcctccgacgtgcgtgcgtccgacaggtaaggcgtggtctcttccatctgttcctccgcctcggccttcagccgttccagtttctcctgcgccgttcccggtttgtccttgatgtcctcctcaggggatgtttcggaagaggtagccgtactttccgtctcgtagttctcgctaccgatactgaagccgctctcgctttccgtgacagccacactctcttcctcttccggtgcgccgaggtcgaaaacttcctcgtctggtttgtccgtcccctttttcccgtagaggtcatgcgctatgatgacggcgtagtaaatgatgtaggcaaccgtcaggacaatggcaaaaatgaaatatgagttcatgtatttagtatgaatattaaaaattcgtattagtatgattttgcaaagaaacgtacgaaatataaaaccataaaataattgagcattaaacatctgtttcgttaatgagatttgtgtaagtttcaaaaatcgaactattaaatcgtactatattgcagtctctatggtgggaaatggagaaatcggggcataaaaaaagctctcgtggtggagagctttaggtggcaaaagagaacattgaatatcagcgtttctttccgcgcaggtagtcgttcaggtctttgtattccgcatagtggcaagattcatcgctgacacgtccgccatacatcccggcaatggtctctgtggttctctgcccggcaaggtcattgtcgagataacagtgaatgtccgaatactcctgtaaacgtgccagcgtctttttcaaattgtttaccgagttcatcacgaggtagtcgcatggtatggcaagacagaccgtccggtcgcctgccagtttcagtgtcatataagaaagaaaatccatgaatccctcgaagacacagacgttttcctgtgtctcttctgtcagatgtcttatcaatgagatgtccttgttattcaggcatcccttgtaataggcgtttcgcacctcgtaaccgcctgatatattgccgaatgcgagagcgaagtaatgacggcctcgcagttcgtaatgcacctccttgcaatacatacggctgatgtccgcgtcgataagccgggattggaggtaagagaacagggcgtgatgacggagtggaatcacgatcacgtctttcatttcagcctccaccggtcggggtggagcggtcagcatacgggttctcggtagtgatgcgccattcacaagcctctctatatacgccagggcctcgctcacgcagtccgtccggcaaatgtattttgccagttccaccaggtcgccaccggtcgcctcgccgaaatcgtaccattcattgatgcggtcattcactttgaacgacggggtacgctcgttccgtaacggtgagagataccagtattgtcccgattttatgtgctgcgtatggtgaccgagacgtgccagaaaatccacgatacgcacttgttttgcttctgctatggtcatgtcttttttctttcacttggtttcacgaaaatggtttagtttagttttttcctatatatataaatactaaagtaaactaaatcatacaggcccgcgcccggcatcattcttcatcaaaaagcatggcctcggtaggcgtcatgtcataatagaacagcttgtcccgtttgatgatgagcttgaggttgtctatcaggtattgcatcagttttatcatgacgctccgaccacgtttgaacccgattgcctcataggagaccatcaggctttgcaacaggttgtcgaatccccggataggcttttccccgaaagcggcggagagggcttcccggtgctgttcgatgctcagctccgtgaaccccgtccgagccttgggcttcgggggctctccgaacgagtgtccttccgcaatgacgggcagcccagtctcgttgatggtgaacgcaaacggcttgaactccttttcccggatatggagcgcatggacttcgctgataccgggattctcgttgctcttgctgatgacaagcacggtttccgccttgttgctcatttccgtaccaatgtgtccccgcacattattatcccctttgttcaaatggagtacacaatggatatgcaggtcgtaccttgaagaccattccatcatccggttgatgacttccaccgattcaccggtgctgttgatgtcaagcatcaggtcgcggatgccgtcaatgatgaccagcccatagcctttgttctgacgcagcgcatagtcgatgacctcgacacgcaccgacggcgaatattcacgcaggcagaagaagtcgagattctccgggtcggttgtcgtgggcagcccggccagccgcaatatgcgctccaataccgagcggcaatggaaacggctctgttccgtatcgacgtacagaatccgctgtttgccttcgggcagatgcgcacggtagttcaacacttgtttcccggccaatgaagcggcgacaagcgcagagacattaaacgtcttcttcgactttgcctttcctgtcgatgcactgaaattgccgagcgtggcaatcgtcgagttgtctatccagatgatttgcggcggggtctcataaatgtccgttgccttgatttgcgaggccagaaggatgtccgacaggcggtgttcatccattcccatatcggctgagcggtcagtctttctttcgttttccattgcgtctcttattaaggaacggttctgtggcggcggcttccgtcgccatgcgcacggcctcgttcactgtaggttcataattctgcaacagccattcgtccaattcctccttggcgaaatagaccattttaccgcgcggtttgtagtgcggtatctccttgctcgatgtgagcttgtacagcatactttcagaaaccccgatatacatacaggcttcctgaaacgtgaacactctcttggtcgtgaagatggtattttccagcaacgtgatacgctccaagagactttcgaccggttccaatttctttagtaccgattcgatggcggcgagccgtccgctcatccgctccatgaatgtcattctattcggcataataacatggtttgatttttgacaatggagatgcaacctccgttatgcagcgcgctaacggaggtcaaaggtatgtccggtaaacgaagatgccgtgatttggggaatgatactatgcgcgtatcattgcaactctcatgcttttacctttcacatacttcgcttcttgtcacttcctgtcattctttcagccggtcaatggtctttcggatgccgtatgcgaccgatgtcatgttgttcttgatggatgacagcgcggaagacagggtcgataccgaaacggaacgtgtcccgtccttggactgcaggaatgcacccttgccgagaacattctgccaccgggactggataagcgagttttcaagaagcgcgtcgaacaggattaccacacggcggatattgttcactcggatggaaaagcctttcttacaggcgaaaagagcctccatgtcttcaatgcgtacagaaacacagaacagatgataagtattggcacaagccacaatactttccatctgttccggggtaaaatcacagccaaaagaaagggagagatctgccggtcggtcaatgtggggcggaccgagcggaggcaacgattccgaggtatcatacatccgtttcagcttcatgcactcgtcaaacgtgaaattcggcgtagcaaagcaaatctggacgaaacgggcgtactcggtcagcagccccttgacgatgtggatgttcatttcgtggcagttccggcaggccgcatggtcgcagtctatgtaccggtgtccgtttacgaaatcgtccacataacggtggtactgtttaccacccgacacaacatcgtggagataaactgtttttgcttcggttagcagggcgaaaagttcattcgccacatccttctccgcagcgaagtgctgcaggtgttggctccctccaaaaagagagaaggccgtcttcaggtcttttcatgtcgatttacctttttgagtttataatatgtgatgaaagcattaacttcggttgcgttcacaaccggagcaatgccataaattgatgtttgtaaattagacatgaaccacatagtgccgtcaattagtgaaacaaaccgtttacaagattcactgcctcgtccttcttcttgttgataatcttggcatacacctgtgtcatttttacgtcggcatgaccgagcaacttcgagacggtatataaatccgcgccgagcgtcagcatcatggtggcgaatgtatgccggctggtgtgataggagaaccgcttggagattccggctgctttcgcccaaggtttgagctgcatcctgattgtattggcggacggcaggtcgaacacattatcttccgatgattttcccccacgttccggcatccacttcaacgcttcaggagagaggggcaggtaaataggctctttggtctttttcatggacacggccaaacggtactgtccccggtcaacgaacacgtctttccatttcaacttgattatatcgctgatgcgcaatccgcagaagcaggagaacagatacgcgcattttactatctcgtattcctcgtggggcataggagtgtcaatcaacgcctgtacctcttcgatggtcatgtacgaccgcatactctccggcttacggattttctccgacttctcaagctcgttgaaagggttggccttcatctttttcttcctgacggcagagttcaacgcaccgttcaacgcacggtaataattgtgaagcgtgtagtttgatatgtccttgcctttcggatgatattccgtcaacagataagtgatgtagccccggcagaagtccccgtcaatctgatccagtgtgaccatttctccggcatagtctttcagtatgcgcatggcaatcttgatttggttgccgtctttcttgcccgcactctcttgggcttccatgtaaaccttcatccagtccaacagataagtcttgtccttacggaatacgattcctgcctcattgctggtcagttcgataatacgtttcgacttgatggcattggcggcatccattgtcgcctgattctgcctacgggcattattatccgtctccgggataatatacatcttgaggtattcatacgtccgctttccatcgcggtatatatccagatatagactcttgctgccatcgctcaacggcttcatccgaagacgaatcggctctttgacttttgtatgattcttaactcgtgccatagggattcctttctcatttttcctattgcaaatatacggataagtatcgagattaagaaacaaataagaaacaaaattgcaccaaataagagccaattcactgaaagtactgaaaacaactgaaaataaaaataggcttataaaacactgatttatagcttatttattatcactttattgggtgttgtttgcattttgtatatatactgcgtaaatctggtaaattgattatggaatgctgtatgatagaaagttattctatcacccatcgcttatcatgcgccaccgtctttttcggatcataagtcattccttctttggtagggatttttatcacgtaagtccgcccgctgtggttggacaaggatgtttcccgcaaccagggattcatattctttaatatggccagattgattcctttgctacgtgcgaaacgtgccaagtctgcaattcctttcgtcacagtgacttccgtatagggaatgggcggatacaaatccgatgcgcgcagacggaaaccgaaagtagtaggggcgctgaacaattgtttggctgcaagaatgcggtacacataccgggctgtttcttctaccagttgcaaatccagcgagtcgtccacattctgtttggccagttggctggcaatgcgtgcctgaccagcgttgtatgaggcggcaacagccacccaatccttatatttagcatacgcgtctttcagataacggcaggcggcacgagtcgctttctcaatatggtaacgttcatccacattgttgttaacctccagtccgtaatcccttcccgtaccttgcatgaattgccatagtccggcggctccggcagaggaacgggcggtgggattcatattactctctatgaccatcaggtatttaaaatcatcggggattccgttctctttcagtatgggttctacaatggggaaataacggttggcttttttcagcatttgcagggaagtactgtgcatataggtgaatgccaataattcacggtccatacgctcgtggcggtcaaagcggctcaagtcaatcactttaccacaaaattcaatgctggagggaactttgggactactgtatttcaatgccgtaatacctaaatcttctcgtatgatagtggtatcttcctgttccgtttggggagtagcacaactgctgctcactaaggcgggtgaggcgactacaatgcaaaaggctgccacagcagccagattgatggttatttttctcatttttcctttattcgttttcattctctttttcttttcctccccgtccgaagttacgatattcggtaggggtgaagttggtacgttttttaaataccgagaaaaagtgttcagtagaggtataattcaattcatagcatatctctttcactgacatggaactttcaatcaataattgtttcgctttgcgcaatttcagctcttggaaatacttggcgggcgcatagccggtgtattctttgaatactttgcggaaccaggaataactgatacctaatttcagtgccagttcttccggatctatatccttgtacacattttcgtgcatgatgattttggcactttctattttttgtgccgcattgtccacctcatagcgtttgttctgcgagatagcaagtacggctcccataatgtgtaaaacaatgccggacaaatattgttgcgctgcggtcttgtctgcttccgctacttccagtgcacgggcaaaaagactggccagttcttcattgataccgatatccaaaatctggttttcttttgaaataaagctgttttttaccagattgtctataatcggaccttcaaaaccgatgtaatattcgttccatcctgttttttgcagcggcgcgtaggtatgccactgtccgggaaacaggaaaagtatctgtcctttagatatgtcgacagacggagtagtatcgctggcgaaagttccccgtcctttagtaatgtataccaactgatattcatgcagcacacgtcctttctgggccgtgaaataataagcgtccgggtggttgcgtggtggataaacgctcccggccctgatggcctggaatccgacggtagtcaccgacaagccgaaacgcttgtcacgttcattgacaattaggtatttaaaatcagcgccttggtcgttgtaatgcatgtttctctgttttaaaattaggtcacacttatcggcaaatatacaattttttatcttaactgcctctaacctttttgtcctaagtgtttctggaggtataattttagtttcttatgtatgcggatgagggaaatttagaacaaatcttatggaatatttgcttaaaatgcttttttttgcgaatattgcatcaaatcttaaagttgaatctatgcactttgcacaccgtaactgtgaatatattcttggagtaatatatcttttgtgttttcccgtttggctttgggctgataacaaggtcaatacctatcattttaaatctatttccacttcggtgaatttcccgaccaatgaagtccggaaattatttcaggatagccaggggtatatatggatatcgacttacaatggccttttgcgctatgatgggtattctattgtggtgtataaacccgatggagtgaatcatggacgttccattgatagttttgtgaatatggtggccgaagacaaggagaataatttgtggataggtacgcacaatggattatatgtattgcataaggaaacggatgagatagaaaaaataatcagtcctttgttacaggtaagcaatgtggagagtattctttatgcaagcaacggggacttatgggtgggaagcaacaaagggttgtttcgcaggaaagccggaggacgtactttcgattgtgaaaagaacatggacataaagtccgttatcgaagacagggaaggacaaatatggattggtacttgggaacaggggttgctgcgttataatcctcaagaggaattgtattatacttacgaggggattaaccctggtaattcggcgcatgtcatatttcaggatgaagccgggaatatttggatcggtacctggcggtatggattggtgaaactcattaatccgtatgatccggaacatttctcatttaaaacattccggaacatcaagggaaattctcattctctgttggataatattatctacgccattgctcaggataaaaattccggaaagctctggatcggttcacgcagtggagtcagtattttggaagatgaatcgggggacgggaattttaccaatattgttccgggtaaccttcaaggagatttaccttttaatgaagtgaattctctgttgtgcagtaaagacgggctgatgtggctgggtatgttggggggaggtgtttgtactgtaaatacaaataagttccggtttaattatgattctttggaggctttgcgtgagcattgccctaccagctctgtccgcagtgtctatcaggaggataatgggaatctgtggatgggaatcatgggattcggtctggttttttatgatatggaacagcataccattgttccttaccgctctcatcctgtattgaagaatatgggatatacatcgacggtcaatgatattatttatcgtaaaaggacaaatgaattgtgttttgccacttgggatgacggtgtgtggttctataacgtcaaagccgggaaagcacacgtggtaaataccgtaaccaacccggaactgagtgatatttgtatttattctttgttggaggattcgaaagggaatctgtggttggggacacgttcgggagtgtttattttggatacggaacaaaggcttcattctttgaatgaactggtgactttgacaaatcaggcattgccccaaatttctattttcaaaatggcggaagatcaagatggttttatctggatagcgactagcaatgaaggggtatggcggatagatacatccggagaaacatataaggttaagttttatacgccttcggatggtacattatccactatcggggcgatgagtgtttgtgtggatggatacaatagagtatgggtggggtcgaatggtaatggactcgatttgtatgaccggaagaatgatcgttttgtttcagtcttgaatgattatttccggaatggagatgttgttttcagtatgctggaggatgatgagcatactttatggcttactaccaatgcggaaatgtatcacattgatatccctttggatggtgctgcaccgaaaatacatacttacacggtagatgatggtttgcaagaccacatgtttaaccggaattcttgcttcaagggggcggatgggaaacttatcttcggaggattccgtggattgaacagcttctatcctgataaaattgttcaggatactgcttattctccggtagtgattacagatataaaggtacataatgtatcggtacgtacctaccctctttccatcagaaaggggattgctgcaaacaggtctattgattttattgataaaattgtattaggataccgggagaataatttcagtcttgatttttcaatattgaactatatcaatcctgagttgaaccgttatttatatcggttggagggatatgacaaggaatggttgtccgttgaggctggacgtcggtttgcctattataacaatcttccggcaggtacttatactttttgtgtaaagggagccaatcagaatggaatctggtctccggatatgaaatgtctgcgtataactattcttccgccgccttggttatcgtggtgggcttattgcctttatgtcttgttgtttgtttcattggcatggtatacttatcggattgtcagaaaccgtatccggatgaaacaggccatagagatggggaagatagaacggcagaaaatggaggaaatcaatcatgctaaattacagttctttaccaatatcactcatgagttgctgactccgctttctattatatcggcttcggtggatgaactgaaacaagaagtaccggcaagttcgtcggtttgtcctgtgatagctgataatactgtgcggttaatccggttgattcagcagatcttagagttcagaaaagtggagaatggcaagttgcggctgaaagtctcgcatggaaatgtcagtatgttcttgaaaaaatcagtgtcggctttcgcacctttggttaaaaagcagaaattgtccatacaatttgatttgtctgaagaatattcgggatattttgatgtggataaattggataaagtggtgtacaatctgctttccaatgccgctaaatatactcctgaaggaggaactattgtggtgtcacaggctcatgatgaggaaaggggaacttttaaattgagtgtgaacaatcccggcgagttgattccaaaagagaagttggatcatatattcgagagattttatgaaggggagtatcgcaaattccataccatagggacgggtatcggtttgtcactgactaaagacttggtattgttgcatcatggaacgatacaagtatttagcgataaggaggaagggaatacttttgtggttgaaattcctataagacgtgaggcttttgatgaggatgaggtagacgagaataccgaaaatgtggactatgctattttatcggcagatgaaatggagaatgtctcggagattgatatgttggaagagaaaccggcagcatcgactattttgttggtggaggataatgaggaattattggctttgatggttcgtctgttgcatggcaaataccatattctgaaggccgccaatggaacggaagctttggagatacttgccaaacaggaagtggatttaattgtttctgatgttatgatgcccgaaatggacggtatggaattgtgccgccgggtgaagactcaatttgagacctgccatattccattgattttgttaacggccaagactagtgatgaagaccgtgtggaagggtatgagtctggggccgatggttatatctgtaaaccgctccgcctctctgtcttgtttgccaagatagataacttgttgaaacggcgcaaacgtatgggggtggatttccgtaagcagttggtttttgaagccaaagaattaaattacacctcgatggacgaagctttcattcggaaagcggtggattgtgtgaatgcccatttgagtgattgtgattttgaacatgcacagtttatggcggagatgggtatggcccggactacactagcagataaattgaaactgttgaccggacttactccctctgcatttatcagcaatgtccgtttgcaagcggcttgtcggctgatagacgagaaaaagaaaatccgtatagccgatttggcgtatgctgtaggtttcaacgaccctaaatatttcagttcctgctttaagaagaaattcggactttctcctacagagtatatgatgaagtatgatggctgattattaccggaaataggctctatagggaataaacagcctttttccggtaataattctccctgtttcttttctgttcctcttacttttgctggcaaataaaacgaattatctttatttgttagacctttaaaaaaagtattatgaacatgaaaactctgacagaaaccagtacattccgggtactgagcctattgctgtgtttctgcttcttcatccctgcgatgaatgtgagcgcttccagtctgcaagcagacaagtttaaagtttccggtattgtaaaagatgccacaggcgaaccggtcatcggtgctagtgtggttgaaaaaggaacaaccaatggaacggtaactgacttggatggtaattttaatctctcggtggcttctaattctactattgtcatttcttttataggatattccgatcaggaatttcatatttcgaaagacaatatggcactgaatgtaaatctgaaggaagatacggaaatgattgacgaagtggtagtagtcggttatggtgtgcagaagaaggaaaatctgacgggttctgttgctgctgtaaatttcaaggatgtagcttctatgccggtagctaatactgccaatatgcttcagggccgtttgccgggtgttatgttgaccaacaatggtgcccaggccggtcatgacagtcccgaaatccgtatccgtggtgtgggaacttttgaacacaatgatccgatggtcctgatcgacggagtggaaagctcggtgagccagattgcggaaattcctgctgatgatattgaaagtgtttctgtattgaaagatgcggcttcggcttctatctatggtgtgcgtgctgcaaacggtgttattttggtgactaccaaacgaggcggtgagcagaaacctactattacttattctggtagcatcgctttgcaggaggctaccgtgttgcccgattatgtgaattcttatgagtgggcgaagatgtataatgaatgttggccttccaaggcatatacggatgatatgttacagaaattgcaaaatggatcagatcccgatcattttgccaataccaattgggctaaggaaatgttccgtacggcagctatgcaccaacaccatttgtcagtgaatggaggtagtaaggcagtacattacatgatttccactcaatatttccagcaagatggtatcttgcgtgagacagctaaccaacgtttcaatttccgttctaatctggatgcgcagttgggtattgtaaaattaggattgaatctttcgggaagccgccagaacattgatgagcctacgaccagtgttaccggcgaaggtttgatgcgctaccttacttggtttacccgtcctactgttcctgtacgctattctaacggacattatggattcctggatggaaatcccaatatttcccaatccgtattcaaaaatccgattgaagctttgaatatgggatataaggataacaagcattatcgttttgatggtaaattctttggtgagattgacatcatgaaaggattgaaattccgttcaagcctggcttataaatattatatgaatgatgtgactactttcaatccgaagaataatgtaagatacgatgctgaaggaaatgcgctgaccacggtcggtaccaataaactgacagattatcattatctggaaacgacttatattaatgaaaatatcctgacttatgatttttctgtaggaaaacattcgttcaatctgttggcaggccattctatccaggctacccgttgggacaagaatgaggcgtccaagcagggatttgctaccgataatatttatgaaatggatggaggtactatgaatgatcatgtgaccggatcggcggaagaaagttccttgcagtcattcttcggacgcttgaactataattacggaggccgttatctgttagagatgaatgtccgtcacgatggttcgtcacgtatgcccaaggcacatcgttatgctaccttcccttcattttcgggtgcatggatcatgacaaatgagaaatttatggagaatgtgaagttcctccactcattgaaattgcgtggtagctggggtaaattgggtaatcaggaaattggtaactatgcttatgcggctacattggcggctagtggtagttactattttggtgatagcaaacagattggtatgaagactgccaagatacctaatgagaacattaaatgggaaacaactactattacagactttggttttgatgctgctttttggggtggaaagatcaatgtcacttttgactggtatgagaaaaatacctcggatattttgatgaaactcgctatgccgggtattttcctgggatctttggatgctccttatcagaatgcgggaaaggtccgtaaccgtggttgggaattggcagctaactatttcgaccaaaaaggtgattgggcatggcaggcaggtttctcactttcaggcgtgaaaaatgagattactgatatgaaaggggtggaagatataagtaataataccatcaatcgtgaaggtgaagccatcggttcttattatgggctgaaagctatcggtatctatcgtacccaggcagatttggatcgtgtaaatgcgaacggacagaagattctgcaaaacaaccaggaaccgcaattaggtgatatcatgtatgaagatatagataataatggcaacataaatgatgctgaccgtactgttatcggaaatccgttccctaaaatgcagtattcttttaacttgggattctcttataaagattttgatgttaatacattttggcaaggcattgcaggtgtatatcgttataattgggatgaaactactatttccaatggcggaaacaagactagccgttggttggacagatggtctgaaagtaatccggatggaagcatgcctcgtttgggaggaactattaataataactactcttcattttggctgacaaaaggagattatttgcgcctgaagaacttggaaattggatatactttcagacaaagagagtttttgaccaagttgggcgttcagagtctcagactctatttggcaggaactaatttgcttactttcacttccttggatgattatgatcctgagaaactgagcacagattcccgtaatgatgtgcatcccaatacaagaacttattcatttggtgttaacgttaaattttaaaagcaacaactatgaaatcaattaataaatttatagggctagctctgttgtcaggagctttgctgacttcttgctctgacagttttttgcagagggactcattgacagaatcttcatccaatacattttggcagacaccggatgatgctttgatggcgttggcatcttgttatgatgctttgcagagcaatcagctttataattccgaccaatattcattgggccctttatatatggattgtatatcagataatggcggtcattttaattggagtggctggatggaaggttatgatatggctatggggattcataccccaagttcttctattattggcagttattggaaagattgctatgaagtgatcagtcgttgtaatgtgctgattgctaatattgatagagtggatatggatgcttcccaaaaggcgatttatcaggctgaggcaaagaccatacgtgcattgatgtatataaacttgactatgacgtatcaggatgttcctttcctgaccgcccctttgaccattgacgaggctgaatgtgaaaagacggaccgtgcagctattgtggctcatattatgactgatttgcaggacgcggctgaagtacttccgcaaaacgcgtcttcacggggacacatcaccaaaggagctgctctttccctactggggcgtgtggctttgtataatcctcaaatccgcaactacgcgcctaatatgatacagaagcgaaaagaatctgcatcgttagtaaaaagggggcacagtgcatcgaatgtcaccataaagacatataaatgccccttaccccaccatgcgacttgaggcaatacgcaaaatcacgactataagttgtcggtgttatccaaagtcattctggaacacattggcataagcattgttgcatgaatagatattcagcacatacttccttgatgtcctgacccatttggctggcacagagatgaacttaaagacaaacgtcttgatgcggcttgttgctttgagtccgaacctcttcacgtcaagcctcgccatgatgaatttatagaagttgcgtatgagtgccataagcagaagaaacaccgtgttttctcccataaaggattttggaagcctgttccagccgaatccgttattcatatcatcgaagatgcgttccttccctccacggaggttatagaattcgacaatctctttctcggaagactcgtagtcatttgtaaggatgcagcggtaggtgtattctccttcccacaggtcgagttcgccgtctatccgcttctgtctttgaatcacaagacggtatgccttccctttccatttctcgatgagaatggaggccagctcaaactcaatgccgcccaattccactttcttccaacctctgagggcaaagatgtcattgtagagcgaactgcatcggttagcacggatatagaaggtcttgcagtgtttagcaatctcttccactatctcttcagaacacgagccgcaatcagctctgaaacggttgataataagcttgttttgttcaaacctttcaaagaacctcttcagcgtgtccttctggtggaaacggacatttgtgttgccgtcgctgttctcaatgccgacaatcaagttgccaataaccgccacgccagggcgataaccaaggaacttcttgtatgtaggcttcgcatcaaacttctcagcctctatgaactggtggtcgaagtcaacgtcatacccctcgccctctttcagctgccctgtggacaataggcaattgaggagcagtgtattcagcttgtctgccgtgttgaagtcgtaggtcttgccagtgtcggatgtgtaggaaatgttatcctgggtcagttcctttatggctctaagaatcgtgtcggcactgcatgtgcgaagtgtcggatgaagcgaaaggtggtacatcagatgagtggtgacatcctcgatgcatgagccgccacaaaaataaacgctcataagcgaacggatgatttcgctgtattgataaccatacagcctgcatctcataccgagggttgagtcgattacagatgagagtctggagtcaaattgctccattattgaaaatattcctccaaaaggagtgagtttctcggatttaattgctacctttgccatgtctgtcgggtttgatacatattttgatttgcaacactaagataggtgaaaaatctgacatggcaaattcctgagcaactttttgttgctcaggtacttaaaaagttatatttgtaatagtgttgcggaattaaggataatgaaaaatgggatgacgcaattgctgcttataagcaggtgcaaggtttgggatactcgcttgatccgagttatgccaaactgtttactcaaagtggagaaacttctcctgaaatcatttttgcagtccgttatgaaggaccgggtatgagtgaaggtgctgcttttaatgcgcattggaatactccgctggaagcaatgaatggtactatagatttggcggatgcttattattgcaaagacggtaagccgactaccgatacgaagatagccgaattaaacaatgagggtggcttggatgttagcaagcctaatcctgctcattttgagaatcgtgatccacgtttgtatagtactttgtttgttcccggtatgctttggaacggtaaaggaggtatagatacttcggcttcaaatccgtatgtcaatgtatatggtggagctgccgcttccctgtctaccatatatgtttataagtattttgatcctacggatacttctaactcttgggataatggacaagacttttatgtggtgcgttatgctgaagttttattatctttggcggaggcaatggtacagaaaggaggctatgcttatagtgatgtaactgctttagtgaatgaagtgcggcaacgtgcagatgtgaacatgcccacagtagaggaagtggaaggcacttctctttctaaagatgaattgttggaagtcattaagcatgagcgtcgtgtggaactggcctttgaaggcttgcgtttgtttgacctttatcgttggaaggaattggataaggcggtagctaatatagagaatgaacgcactatgtatggcttggcttatgaagcacgtaagttcaacggtgagagggattatgtatggcctttgccaactgccgaactggatactaacaagaaactggttcagcacgacttgtggaagtaatgtagagtgtaggttttcatcacagggtacatggattgtcacaaagaagtaggaggcaaacaacctttaaatcaaaaaactgtgtgaatttgcgtaatctgtggtgaatcctagttgttctgacaacttctggaataaatagataactttttaaaaacggaagagaaatgagaaaaacaatgatccttcttttattttccttcctgttggcagcatgttctgatagtccagtgtgctattatctggatgctaccggcggtgatgataataatagtgggttagccccggatgaagcatggaaaagtctggaaaaactacgtggagtgaaattactgccgggcaataaagttttgttgaagcgcggtgaggtttttaatggcgaacttgaaatcaccggatacggtatacccgaagatcgtatttatatagatgcttatggtgatggtgaacggaaaccttgcattgtgggatatgatacttccttgtatgcagctcgtatctgtaattcggactatataacgatgcagaatttggaaatcgtgaatacaggtagacagcctctgccttatcgttcgggcttgaagatagagtgtatggattatggcgtatcgcagaacattgttgtcaataatgtgactgtacgggatgtcaatggttcgttggtaaaagaaaaaggcggagggtgcggtatttatatagtgaatggcggtgaaaagaaaatttcaacattcaataggttaaccatagagaactgccatattttgagatgtacccgtaatgctatgatttgggccgcttatagcgatcggcagaactggcatcccagcaagcataccgtgatacggggaaatttgatagaggaagtaccaggtgatggtattgtacctatcggttgtgacagtaccttgatagaatacaacgtaatgcgtgattgtcctgatatgcttcctgacacagaggcggcggcaggtatttggccgtggagttgtgataatactttggtgcaattcaatgaggtaagtggtcataaggctccgtgggatgcacaggggtttgattcggactggaattgccggggaacggtcattcagtataattatagtcatgataactatggtggcttagtattggtttgcaatgacggcacggccgacgcatcttttaatgtaggtaacttgggcactattgtccgttacaatgtgagtataggtgacggagtgcggcctgaaccgactcgtgccgggatgttctcaccagctgttcatctggcaggtcctgtaaaggacagtcgcattacccgtaacattattcatgtgaaccgtaaacctgcggctgatatcgatcgtactatgattactttggattcatggggcggatatccggatagtacatttattagtggaaatattttttatgctccagaatccagcagattccaattgacagaatctacacataatttctttgaaggcaattattaccttggtcggttcgagaaattacctgaagatggtaaagcctgccaatcagctgaaatttatcagcaggaagtattggcaaaggatgaaaacggttatcagggcttggctttgttgatggatacggtggaagtgaccggagtaaaaggagtttttgtcaataaggaagccattgagaatttctttagccggttagagaaataagtaaataatagctgtaatttaatcaggggggcaaaactaaaatgacctgatcatatagcacgataggttgttttagttttgacccccttttatttatggctcattctttcttttttagatccatttctccggagaaagaaatagattgtctgtttgtaggggtgacctgtatgttactgctgccattgggataaatgatgatattgtaaaggtaattgtcttcctcgttccgtacttttagtgtgattttagcattcccctttttattatatgctgaagtatattctgataaaggagcactaaaatttaatccttttccacccccgtaaggaacgttatacgccactccgaaataaggcagataggaataaaccgaatcgtttcttatttctaaagaataatcggaagtcaggtgtttgctgcctcctttcataggcattacccggtccacattgattttgtatgtctttgcgtcaacagcttcgcgtacagcttgttctgtctgttgcttcttctctttcttactctgagccgctataggtgtcaggctgcttgatagaaagaaacttgccaaaaggaataatttatttgctttcatatatctctgtaggtttagtgaatctgtctttgtcaaagatagccaaaaagagtactcgttgttctaaaaaaaacataagatactcaaactgtcaatgagttaagtacgcgattgtctaggaagtgtttgctgtatagggagtgttaatctttttaatcaatagaataatgagataaaaacataaattggtcattttatatgcttgttcatttgtgatgaatatcgtgtgatgaaaagcttaagtggcaatctggatctcatttatcttttaagcttcgataataaaaaagatgatttgtccccatgtgggttcaaatcatcttcaaaatctccccattaggggaagaccataaaaatattatttgggtagattaaaagccacactcatttctttcatctgttcctggctcatgccgtcgggttcaaatcccatatttttggcagcgatgtaaattaatgcggatttatttaaaacatcaatttggtcgaatgcggccattacgtcacagtcaacagcaaagataccgtgtttttcccacatgactacatcataatcagccaattccttgatagttgcatctgctaattctacagaactgggtaactgataaggaatcatgcccaatccacgtgggcagaatgcttttgtttcgggaatcatgctccatagcaggttggttgccacatctttctccatgaactttttgttgtgagacaaggcaatcagttcgatggggtgtgtgtgtacggatgctttataaggagagcctatgctaatgagataattgtgtacgctcaggtgggagggaacttccgaagtaggttgaaccggtttgtcggcaataatgacataactagcacaatcatctaaaatacggatgacagaaccgttatccataggccaacgtgccaaatcccgcatacgcatattggttcctttgcaataaaaataacagcctttcaagtgaggcagtgttacaccgatttgttttacttcgctgatagcgggcatctgacggatttcatcgtctacatactcggtgatattgacggtgatattacctccgttacgttcggcccatcctttttgccacaaatatccggctacttcggctactttattcacctctttgaccaattcggggcgattgtctaagattgatttcatatcttcttttatttgattgttcatagggtattgttattcatttttttattctgaataacagtatgctacaaatataataattcttttagaataaattagggaatacaagagaaaagataagaactaccagtccggttaccagaacagtgatagtttgggtggatacacctttccattcttttaataaaataccccatacgttactgaaagtaacattcaaagccattaatatacaccatgagaaggcaagcagtacaggacttccggtcaggaaacttttacccatttccagtccgaagaattgcatgtaccacagtactcctgccaaggcgcagaatatcaggttgtttacccatacattgcctttggcataatcactcatagttttgttggctacattttgttgcagacagtaaacggcattggttaaaaaaccgcctagtgttaccagaaagattacaggaagtcccgcataaagaccttctacacctccagctaacgcagcttccttgatgggagttcctgcatcgagtcccaaagcgaaacaggcactcatcacacctgccagtagggctaccaacagtcctttagtcagagcaaaatcttttactgccgcgcgtttatcttcctcgctcatgtttttggcgcgaagactgccggcatatcctataatggcaatgcccgacaaagtgatacatactcctagtaaaagaataagtccgtttcctttgaacaggttggttccggcaaagatggcggggaacagtgtaccgaatccggcacaagtacccagtgcgatactttgtcctaaggctactcccagataacgcatggaaagaccaaaggtaaggccgcccactccccataatataccataaaagatgctcattggagcacctcccgctccccaaaggtcaaacagactgcctccttggggaatacctagcaatgcgcccaatagtgggaacaccaaccaggcgaatacaccttgtatcagccaaaaactttcccaactccattcttttactttcttgataggtacgtatgaactggattggcagaagcttcctatagcgataatgattaatccgataatgatttccattgtttatattctttaaaaccacaaatacgttctctgtaggggcagatacatgaggccacccttacagaggacgatattgtggttggatattgattagcgtttagaagtaacttctgcttcgtatttctctacttctgcaatgaactcttcgcctacgggtacattgttcttcaagcagaacatatcccatacagcattccaaggcaaagctttttcttcttcgagcagagccagacgttggaatccttgtccgtttgcttcgtattcgcgcaatttggcaatcggttccagcaaagcgcgtaccatacatttctgagctgcacggctgccgataacgtatgcaccgatacggttgatggaagcatcgaagtagtcaagtccatagtgtacacgatccaaggcgttgcaacgaacgatttcgctgaacaaatccatagtcgggtcgtccatgatggttacgtggtctgagtcccaacgtacggggcgacttacgtgcagcatcagttcgggaacatacaacaataaagaagaaactttgtctgcaacactttctgtcgggtggaagtgcccggtatccaaggtaatcatcttgttgttcttggcgccatagccgatatagaaatcattagaccccactgtatagctttccagtccgataccgaatactttggattcgatacagtctttcatgttcttgtattctgttgcgaaaatctgatccagagagtcttttaacaaagcacgatatttcatgcggtttacagtgatgtctttgctgccatcgtgtacccacaggttcatgatacaaggatcgccttgagctttacccatttcttcggctacggcacggcaacgtttagtatgttcaatccagaagttgcggataccttcatcgggatttgacaaagacagatcaccgcttttgggatgggagaatgaagtagagttgaaatccagtttcatgttgttttccttaccccattcaatccaacttttgaaatgttcgggttctacttcgtcacgatctacgacttttccttgaaagtcgccataaatttcgtgcagattcaaacggtgagtacctggtatatatgaagcagctttcagaatgtctgcacgcagttcgtcgatgttgcgagctttgccgggatagttacctgtagcctggataccaccggtcaatgaacctgcctgaacttcgaaaccggttacatcatctgcttgccagcaatgcagtgacagatggaaattctgcatggtttccattactttttctgtgtcaacacctacagcggcataacgttcttttgcaatctcatacgctttattaatcaattcttctttcatgatattatttgtttatttaatgaataaatttcaaggtgaatattaaatatcttctctataatgagctaaatacttcttatatgcttcttcccattcttctgcttgctggggctcaaaagaaacggtttctatggaagtgctgattagttggcgcatagccgcaatatcgtttaccagcccgttggcttttgcctgtaacataatgttgccgatagctgttccttcactgggacctgctataacaggtacgcccactgcgttgcaagtgaattggtttaacaaattgtttcgtgagcctccaccgataatgtgcagcttttcgatggggaacggggccatttgttgcaaatagccgaatacttgtttgtagcgcagggcaagactatcgaaaatacaacgagtgatttcgccataactctgtggtacaggttggttggtttctttgcaataatgtccgatggcttgaatcatagatgacggattggcgaagcagggagcatcgggattgatgacactgcggaaagcgggaactgccagggctgcatctatcagttctgtataagaatagttgttggttgcttcccattctttgcggcaacgttccaacaaccacatgccacagatatttttcaggaaccgggtcgttccttccacacctccttcgttggtgaagttctgttcaaagctttccttatttataatagcatctttcacttcaatccccatcaagctccacgtgccggaactcagatatgcgaatttttcgttttgtgccggtacggcagctacggctgaacctgtgtcatgaccggcaacggcaataacaggaatagctcccagacctgtaattttttgcacttcttctgtcagcactccaataggttcccctggaaaaacaaaacggccgaactgttctttcttgatatctgctacatccagtagttccttttcgaagcatttggtgcgcggattcaacatctgggaagtagaagcgatggtatattctgttaccattttaccggtcagcatataacttaaagcatccggcataaacagtattttatctgctgcttccaaggccgagcaatgattgcggtggagtgttgataattggaacaaggaattgaaattcataatctggattccagtgatgtcatatactcgttcacggggaatatgggtaaaatattcttcgggtgcacctattgtgtgagggtcgcgataacaataaggattgcggagtaactctccatctttgcccactaatacgaaatccaccccccaagtatcaataccgatagactggataggcagattgtctttggctaccactttcagtcccttgataatttcattgtataaggcataaatatcccaataacaatgtcctccggtttctataatatggttagggaaacgagtcagttctttcaactccattttgccttctcccaggcaacctaagatggtacgtccgctggtggctcccaggtctaccgcaaagaaataagtgtgttccatgcctttattttttgattttaaggaattaatagtgatgcaaaaatagtttattccccgaaagtcgtccttgtttttttgatattataactgttggatttggttgtacctgtcgtaaaacataatattaccgtctttttaagaagattgcattgaaaagaaaaatttggtatgattttggtttattcttaggatgatagataaaagctttattgaaaatatgcataaagtcgcaaaaatattctcttttttgtatctatattcccgaatattctgtaattttgcagccgaattagaataattatgcagtatgaagagcaagaatagcagacttgatgccattaagattattatttcgagtaaggaagtaggtagccaggaagagttgttgcaggaattggcgaaagaaggattccaattgacccaagctactttgtctcgtgacttgaagcagttgaaagtggcgaaggcagccagtatgaacggaaattatgtatatgtattaccaaacaataccatgtacaaacgtatgactgagcaacattcggccagtgagatgttgatgcataatggatttatttccattgaattttcggctaatctggcagtaatcaagactcgtcccggatatgctagtagtttggcttatgatattgataaccggaactttgatgaaatattgggaactattgctggtgatgatactattatgcttgtcattcgtgaaggttgcacaagagcgggagtgaagaatgcactttcattgattataccgaatatacaataatataataatagataaaaaaggagatggatgctaaacaagtggatgtgatggtggcagatgcctcacatgaagtttacgttgataaaattttagatactattagagaagctgctaaggtacgcggaacaggcattgcagaacgcacacatgaatatgtgactacaaagatgaaagaaggaaaggcgattattgccttatgtggagatgattttgcaggatttacctatattgagtcatggggaaacaagcaatatgtagcaacctcgggattgattgtgcatcctaattatcgtggaataggtttggccaagcgtataaaggcggcttcgttccgattggcacgtctacgatggcctaaagcaaagatattcagtctgaccagtggcgcggcggtaatgaaaatgaatacagaactgggatatgttcctgtaactttcaatgaactgactgatgatgaggccttttggaaaggttgtgaaggctgtatcaatcacgatatattagtggcgaagaaccgtaagttctgtatttgtacagccatgctttacgatccggctttgcacgaagaagacactatttaataaattaaaaattaagaattaaaaattaagaattaaaagatggctgcgcattcatgtacttatttctcagttttcaatttttaattctcaattaaaataatatcattatggaagaaaagaagaaaaaagtagtagtggcattcagcggggggcttgatacctctttcactgtaatgtatctggctaaggaaaaagggtatgaagtgtatgcagcttgtgcaaacacgggtggtttcagtgaggagcagctgaagcagaacgaagagaacgcttacaaactgggtgctgtgaagtatgtgacattggatgtgacccaggaatactatgagaagagcttgaaatatatggtattcggtaatgtgctccgtaatggtacttatcctatttctgtaagttctgaacgtatcttccaagggttggctatagcgcgttatgctaatgaaataggtgcggacgctatcgcacacggctcgactggtgcgggtaatgaccagattcgtttcgatatgacttttttggtactggctccgggagttgagatcattacattgacccgtgacatggcattaagccgtcagcaggaaatcgattatttgaacgaacatggttttgccgctgactttacaaaattgaaatattcttataatgtaggtctttgggggacttctatctgcggtggggaaatattggactctgcgcagggtttgcccgaaagtgcttatttaaaacaggtgaccaaggaaggaagcgaacaacttcgtcttacatttgaaaaaggtgaactgaaagctgttaatgacgagaagtttgatgatcctatcaaggctattcaaaaagtggaggagatcggtgcgccctacggtatcggccgcgacatgcacgttggggataccattatcggtatcaaagggcgtgtaggattcgaggctgctgctcctatgctgattatcggtgcccatcgtttccttgaaaaatatacgttgagcaagtggcagcaatattggaaagaccaggttgccaattggtacggaatgttcttgcatgaaagtcagtatctggaaccggtaatgcgcgatattgaggcaatgttgcaggagtctcagcgtaatgtaaatggtacagctatcttggaactccgtccgctttcattctctactgtgggtgttgaatcaaaagacgatctggtgaagaccaaatttggtgaatatggtgaaatgcagaagggatggacagcagaagatgctaaaggctttatcaaagtgacttctacacctttgcgtgtttattataataaccacaaggacgaagaaatttaataagtatgattaaagcaggaattatcggtggggcaggttatacggcgggcgaattgattcgtctgctgattaatcaccctgatgtagacataaagtttataaatagcagcagtaacgctggcaataagattaccgacgtacatgagggactctatggtgaaacggatttggtttttacagacgaacttcctctggatgagattgatgtattgttcttctgtacggctcatggagatacaaagaagtttatggatagtcacaatgtacccgaggatttgaaaatcatagacctcagtatggactaccgtatcaagagtgatgaccatgacttcatttatggtttgccggaactgaaccgtcgtgctatctgccatagcaagcacgtggccaatccgggatgttttgccacttgtattcaattgggtttattgccgttagccaaacatctgttactgaacgaggatgtaatggtaaatgccattaccggaagtacaggggcaggggtgaaaccgggtgctaccagtcatttcagttggcgtaataataatatgagcatttataaaccgttttctcatcagcatgttcccgaaatcaagcaatcattgaaacagttgcaaaacagctttaatgctgaaatagattttattccttaccggggtgatttcccgcgtggtatctttgctactctggtagtcaaatgcaaggtggaactggaagaactggtgaagatgtatcaagactattatgccgaggattctttcgttcatattgtagacaaaaatatagatttgaagcaggtggtgaacaccaacaagtgtttgattcatttggagaaacatggcgataagctgctggttatctcttgcattgacaacttgttgaagggggcaagcggacaagcggttcataatatgaatctcatgttcaatttggaagaaaccgtaggattgaggttgaaaccgtctgctttttaataaagaagagtttatgaaattatttgatgtatatcctctttttgacataaatattgtcaaaggaaaaggttgtcatgtatgggatgaccaaggtacggaataccttgatttgtatggtggtcatgcggttatttctatcggtcacgcacatccatattatgtggaaatgataagcaagcaggttgcacagttgggattttattccaattcggtggttaacaagctacagcaggaagtggcagaccgtttagggaaactttcgggttatgatgattatcaattgtttttgataaacagtggagctgaagctaatgaaaatgcgttgaaactggcttctttttacaatggtcgcaaccgtgtgctttctttttgcaaagcatttcacggacgtacttcactggcagtggaggtaacccacaatccgaaaattatagccccaatcaatgacaatgggcatgtgacttatctgcctttgaacgatatagaagcagctaaagcggaattggcaaaaggagatgtctgtgcggtgattattgaaggtattcaaggagtaggcggtattcaggttccggaagtaaaattcttgaaagaactgagtaaggcttgcgaagaagtggatgcagcccttgttttggatgaaatacaatccggctacgggcgtagcggtaaattttttgctcaccaacatgcaggtatccgtcccgatataattacggtagcaaaggggattggtaatggctttccgatggctggtgtcctgatcagtccgaaattcaagccggtatatggacaattgggaaccacttttggtggtaaccacctagcttgtgctgctgctatcgcggtgcttgatgttatgaaaggtgagaatctggtagagaatgctgccaaggtaggtgctcatctgctgaaagaattgaaacaattctcacagattaaagaggtgcgtggcgaaggtttgatgatcggtatggaatttgaagaaccgattaaggaattgcgtcagcgtttgctgttcgaacagaaagtatttaccggagtcagtggtactaatgtgattcgtctgcttccgcctttgtgccttactatggcagaggctgatgaatttcttgaacgctttcgtaaagtgttggtataagctggagattcaaaagggataataatctacgaaagaaaatgaggtctcgtcaggaaacatttcggttccggcgaggctttttgatttaatcttcttcaaagtaattttatttttagcttttcataatacgttcttctcctttttttcccttatctttgtagctatagacttaatctttaataatatgaaagtagcaattattggtgcgggaaatatgggaggggctattgctcgcggccttgcccaaggcactatcattcctgcgagtgatgtaacagtagccgatccgttcagcggaagtctggaaactctacaggcggattatccggagattaatgtaacaacggaaaacccgaaagcgataaaggatgccgatatcgttattctggctgtaaaaccgtggttgatagatcaggtattgagtgtgattcatttgactcctcaacaagtattagtttctatcgcaggcggtgtaacctttgagcaattggtgaagagtgtaggcccggaacagactatattccgtctgattcccaatactgctatatctcagctggaaagtatgaccttgatatccagtcgtaacgccagtaaggaacaagaacaactgatgctggatatctttaatgaattaggattggctattcttattcctgaaagtcagatggctgctactacggctttgacttcatgtggtatcgcatatgttttgaaatatattcaggcagctatgcaggcaggtattgaattaggaatttatccgaaagatgcacagaaaatggttgctcaatctgtgaaaggggctgcttccttgatattgaataatgatactcatcccagtgtggaaatagataaggtgtgtacgcccggtggtatgactatcaagggtattaatgaattggatcacgaagggtttgactcagcgatcattaaagcaatgaaggcttgtctgaaatagataataggtatgatggagctgtgatggaaatcagcttttatgtctctatttgaactgagcaggcgtttggagaaaggaaaccagcgcttgctcatcttttaatttttcatattatagggatatctcccaatattgggattagatatcgtttccacctttcttgatgaaatattgtgtgtaagtggaagtttatccgatggagagtatccaatcatttcatagtgtggagaattgttaagataatatgtataactgaaaaatataagttgctatgaaaaaaaatcgtttatttgctatattgatagcattctttactttttcttgctttgctcagaattggaaagccgaccatgtgttcttgattggccttgacggttggggggcttatagtgtggaaaaggctgagatgccaaatgttaaaactttaatggatgcaggttgctatactttgaaaaaacgtagtgtgcttccttcttcaagtgcagtaaactgggcttctatgtttatgggggcaggacctgaactccatggatatacagaatgggggtctaaaactcccgaacttccttcacgtgtagtaaatgagcatcatatatttccaactattttcagtgaacttcgtaaagctgttcctgatgctgaaataggagtgttgtatgagtgggatggtattaaatatctagtagatactttggctttgaattatcatgtgcaggctcctgactataatctatatcccgctgctctatgtgagatggcatgtaagtatattacagaaaagaagccggtcttgactgcaatttgttttgataatcctgaccatgtaggtcatgtggatggacatgatactccggcttattatgcaaaattgaaagaattagacggatatgtaggtcggatagtagatgctatcaaggaggcaggtatttatgataatagtattattattgttacagccgatcatggaggaataaataaggggcatggtggaaaaacgatgcaagaaatggaaactccatttattattgctggaaagaatgtaaaaaaaggaggaatttttgatgaaagtatgatgcagtttgattgtgcttctacagttgcttttatttttggcttgaaacaaccgcaggtttggataggccgccctatgatacagttgtttaaataattattttcaatagtgatctatgtgaattaaaaagtgatttgctttctgtaattaaagttgttttgattattaaggttgtgttgcaaggaatttcatgaattctaattaactttgcattaactgatgatcaggctatagtggtggtttacagtaaataaaggaaggttaagtaaaagactatggacaaaagagacaaaaaggaaatgaaccgtagagaatttctaaaaattgtgggtgttagtacagttgcatctacggtggcaatgtatggttgtgcatccggcgagaagtcgaatgcgtctgaggcttctattttaggcgaagtgcctgttgataaaatgacttatcgtacttctccaaagggagaacatgtttcacttttaggatatggatgtatgcgctggccgttgaaaccagcgccggacagtgatggaaatgtgatagaccaggatgcggtgaatgagctggtggattatgctatcgctcacggagtgaattatttcgatacatctcctgtttattgccagggattttctgaaagggccactggtgtggctttgaaacgtcatcctcgtgaaagactgttgattgcgacaaagatgtctaattttcaaaattatactcgtgagaattccatcaagatgtaccatcagtcgatgaaagaattgcagacggattatctggattattatttgcttcattctgtaggtggaggggaagggatcaaaactttccatgaccgttatattgacaatggagttcttgactttttactaaaagagcgtgaagaaggccgtattcgtaatttgggatggtcatttcacggatcggtggaagtgtttgattatttgctgtcgctggatgtgaaatgggattttgtgcaaattcagatgaactatgtagattggcgccatgcttcgggtcgaaatgttaatgcggaatatttgtatggagagttggccaagcgtggaattccggctgtgattatggagcctctgttaggaggacgtttgtctaaactgaacgaccatctggtggcgcgcttgaagcagcgtcgtccggagaacagtgtggcatcgtgggcattccgttttgccggtacgtatcccaatgtgttgtgtgtgctgagtggaatgacttatatggaacatttgcaggataaccttcggacttattctcccttagaacctttgaatgaggaggaaaaagagttcttggaagaaacagcccaattgatgctgaagttccctacgattccttgcaatgactgcaaatattgtatgccctgtccttacggcttggatattccggcgattctggtgcattataataaatgtgtcaacgaaggaaatgtgcctaaaagcagtcaggatgagaattaccgccgtgcacggcgtgctttcctgataggttatgaccgtagtgtgcccaaactgcggcaggcaagtcattgtaccggatgtaaccagtgtaacccgcattgccctcaaagtattgatattcccaaagaactgcatcgtatagacgcatatgtggagcagttgaaacaagagactttataatggaatggataaacatgataaaataacgaatgcttatgttacgtaaaataagactcgtcgccgcccttttgttctttacaatgatcacgttgctgtttctggattttacaggaactgtgcatagttggtttggctggatggcgaaaatacagtttcttcctgccgtgctggcactgaatgtgggggtgatgatagcccttgttttgttgacgttgcttttggggcgtgtctattgttcggttgtctgcccgttaggtgtgtttcaagatattatttcctgggtttcgggaagggtaaagaagaatcgtttccactactcgcctgctttgtcgtggttgcgctatggggtattggcggtgtttatcgtcgctttggtagcaggggtagtttcattgacggcattgattgctccttacagtgcatacggccgtatcatttctaacctgctgacacctttgtatcagtgggggaacaatgtacttgccctatgggcggagcgtgtagacagttatgctttttattcggtagatgtttggatgaaaggtctttctacttttgtagttgcagtgggtactgtgatagtgctttttattttggcatggcgtggaggaagaacttattgcaataccatttgtccggtgggtacagtattgggactcttatctagatattcttattttaaaccggttattgatacgtctaaatgtaatggttgcggactttgtgctcgtaattgcaagtcttcctgcattaatcccaaagcacatgagattgattattcccgttgtgttgcttgtatggattgtttaggtaaatgtcgtcaggatgcgataaagtatgtatctggagcaataattcagaaaaagcaggttttgagaagagaagaaacaggtcagtcagcttctcaatcgtcttcaaattcagaaaaggtgaatacgtcgcggcgaaatttttttacggtttctgctttacttgctacaagtgccgtaatgaaagcgcaggaaaagaaagtggatggaggattggcgcctcttattgataaaaagaatcctaaacgtgccacttctattgttcctgcaggagcgagaggtcttcgtcattttgcacagcattgtacggcttgtcagctttgtgtgtcggtgtgccctaatcagatattgcgtccatcgggtgatctgaagcggttgatgcagcctgagatgtcctatgaacgtggatattgtcgccccgaatgtgcgaaatgtgcagaagtatgtcctactgatgccattcatttgactagtttggctgaaaagtcggctattcaaatagggcatgccgtgtggattgctcaaaattgtatagtgaatacggataaggtaagttgtggaaattgtgctcgtcattgtcctactggtgctattcaaatgatacctaaagatgagaatgatgaaagttcacctaaaataccggttgtgaatacagaacgttgcatcggttgtggcgcttgtgaaaatctttgtccggcacgtccgttcagtgccatttatgtggaaggacacgaaatgcatcgtgttatttgaatgaaataaaaaatggataaattaatcaaactgttgcatgaaggtaattattcttgtgtaataaagaataaggaaatcagcacttttacacagcgtggaataactgatttgtatgatttgttgaatacggatccggcttttctgcgtggggctcagattgctgacaaggtgataggaaaagctgctgctgttttgatggtattaggtagagtacaggaagtttatacagatattatcagtgaacctgcattggttttattgcggcgtgcgaatataaagctagattgtatgcaggtagttcctcgtattcagaatagggaccggacaggttggtgtcctttggaaactctttgttatgaggagaattctttggagattttgtattccattattcatgattttgtagaaagaatgagaaataatttataatgtgtacaacttttatggttgttaagatggttgcttttccaaatacctaatctgaaaaaggataacataaagaaaatttattccggtaatattgttttgccggaataatgtttttatagcatgtaattttctcaatgatcctttataaaagttgtatcgtgtttcttttcgtctttctcaattatctccttttaactctcttttatcgggggaataatagttgagaatattagaggaatagttcaatgaacttttaatacttatttcataggtatatgtttgcattttccgcttgcctcttctatatctagtcggataatttctgttctgtgaaaagatttttgggcatattggttaccaattactttgtcgtttggagagtatttttctattaataaatgtaaagcgtttattcgttcttcttcatttaagccaatgtatgcccgacatttcaatataatgctctcatattcagttgtgaattgattggatatgatatgagtctttcctataatacagaaagaaacggtgttgcagcgtttgatacaatgtaattttcgtccttcgggagcacagtgaatgtaaatggaatttttcttgttccatacataattgataggaactccataagcgccgttttcttcatcttgcatggacaaaactccgtattctccgtttttcaataagctgatagctttttctttttctaacagacggtcttggcgtctgatttgttcattcgtataattcattctatttcatttttctgcaaagtaagtataaatatggttataagaaaggttatgggacaaagattattttatagtttcaaatgaaagtatttgaatgatcactttctgtaaaaggtttgtttgtgctcattgtaagcgtgtttgtgcagttttattgtctgttagatagttttcttcgaaacttaatgaaactttgctaggaattctcaaatcttcattatctttgaggcataaaacaataagattatgagtgaccagataaaacaaatagctgagcgtctccagggattaagagacgttctggaactgactcctgatgaagtggctaaaagttgccagctttcagtggaagagtatttgggtatggaaagcggggagaaagatatttctgtcagtgctttacagaaaatagcccgtaaatacggtattgcattggatgtattaatgtttggtgaagaacctaagatgagttcttattttctgactcgttgtggttcaggagtgtcggtagagcgtaccaaggcgtataaatatcagtcattggcttccggttttcgtgggcgtaaggctgatccttttattgtaactgtagaaccgaaaccggaaaatactccgattcattttaactcacatgagggacaagaattcaatttggttattgaaggaagaatgttacttaatataaatggaaaagaattgatcttgaatccaggtgacagtctttattttgattcttctattccacatggtatgttggcattggacgataagactgtgaaattcttggcagtaatattataataaattgagattaaaaagactgtgttgtcattgaccgcataatatttctaatttttagttctcaatttttaattgaataagattatggtagaaaaattcttagaacagaccacatttacctcacaagaggactttataaagaatttaaagattaaaatccctgaaaattttaattttggttatgatatagtagatgcttgggctgccgaagaacccgataagaaagcattgttatggactaatgataaaggggagcatatacaatatacttatgctgacttgaaaaagtatacggatatgactgcttcttattttcagagccttggtattggtcatggcgatatggtgatgcttattttaaagcgtcgttatgagttctggtactctattattgccttgcataaattaggagctgtggttattcctgcgactcatctgttgacgaaaaaggatatcgtgtatcgttgtaatgctgctgatatcaagatgattgtagctgcaggagaagatgtgataacaaagcatattatagatgccatgcccgattgtccttcagtaaaaaagttggtcagtgtaggaccggatattccggagggttttgaagattttcataaaggtattgagaaggctactccttttgttaaaccggaacatcctaatacgaatgaagatacttcattgatgtatttcacttcgggtactacaggagaacctaagatggtggcacatgattttacatatcctttgggacatattgtaactgccagtttctggcataatttgcatcgtgacagtcttcatcttaccattgccgatacaggttgggggaaagctgtttggggaaaactttatggacagatgatagcaggagccaatatttttgtgtatgatcatgagaaatttacaccggcagatattcttggaaagattcaggattatcatatcacttctttatgtgctcctcccactatttatcgttttttaattaaggaggacattagtaaatatgatctttcttctttggaatactgtactacggcgggagaggctttgaactattctgtatatgaaacgttcaagaaaatcacaggtattcgtctgatggaaggttttggacaaacggaaaccacgttgactttaggtacttttccctggatggagcctaaacctggaagtatgggggtacctaatcctcaatatgatatagatttgttgacccacgacgggcgttctgctgaagatggagaacaaggtcagattgttattcgtacagataggggtaaaccattgggattgttcaaagaatattatcgtgcttcggaattaacggaagatgcttggcatgatggtatttattatacaggtgatgtggcttggcgtgatgaggatggttatttttggtttgtaggtcgtgctgatgatgtgatcaagagttcgggttatcgtataggcccgttcgaggtggaaagtgctttgatgactcatccggctgttgtggaatgtgccattaccggtgtgcctgatgaaatccgtggtcaggtggtaaaggcgacgattgtcctttctaaaacttttaagggtaaggaaggacctgagttggtaaaggagttacaagatcatgtgaagcgtgtgactgctccgtacaagtacccacgtgtcatagagtttgtagaagaacttccaaagaccatcagtggaaagattcgtcgcgtggaaatccgtgaaaaggataaataatcagttgtggactgatcggagttttattggtaaaataattaaaaatgaaaaaggttttacttcttgtgtttttaagtctggcttggctatcagtaagtgcgcaagctttggttcctattacatggacagcctatggtctgacttttgaggctccaaaagggattttggtggaggaggatacagaggagacttttcttctgaacaattccaagttttatatcaccattcagtctttggattcggatggtatgacaaaaagtgacttgaaaagtgtattaaaagactatgccaatgatgacggggtgaaagaccagtcggcagtgcaggagtttgagttaccacagtttttcggtacttatttaagagggagctgcgaaacagatcattgcctttatgcttgtttgatgactaagacggcaggtagtggattttatatatctattatctatagcaaggaaaatgaaaatattgccgaaaaaatactgaaaagttttataatggaggaataaacaaaagagcgttaatgcttgtttcttagataagagagcgttcaaaatttaccagaaaattactagattattaatagcaaatgaaagggctgtcttcgtgagaaggtagtccttcttttttgtgtagttatgaatgttaaaggactctatgatccatgtgtaatatgctttgccggcatcagaaaatcaaatgattttgggcataataagggacactcatagaatataagttagccaactaattcgcaatactttaagtatgaattagctggctaacttatattattctatgaatgtcctaggttaagacattaacgtccggtccaccataaaggagtgatgatattatctgagcctcctaacaactctacagcttgtttatagccttcgggatctgcattctccagactggaaggatatcgcatacgttgtggataaaattcccacttctgtccgtctttccaagaattaggattccaagcattaaccatgtctgaaccagtcattgaactttcgtttgcaggaatctcaaagaatggtaatcccaaacggcggaaatccgaccacatttccaataccaaatacggagtttgtgcaatgaatttttgagtgataattttagtcaagtggtcattcaatgcttttccatataaagttttagaagctgtaggatattcataagtaacagttttctgttctttgctgtatccatccacataagtcatttgttcagcagtcggttcagtggtatgatcaaatttgactgaagtacctacacgattgtagttggtggaattcagataatcattcacatattcgctaacaccaaagtattcaaaactagctttaataccgttctcataggcttcttttgctgttgttccagtgttccaaccatacaatgaagcttctgctaacaagaaataagtttcccatgctgcaaagaatatgcgagatttgccctgacaatagtctttacccaacattggaagagtacagccggggccatatccatttgtcactagttggttataagccaaggttggcgaccatccaccgcgcgaaccagcgggataaccattccaacaacgagttgcatcaatctttatttccccaggattatccttattaggaatcggattcccgttttcgtctactgtgtaaagaacgaaatctttagctgttctatcattatatttatctatgtagttctcagcattttcatcatcaggtaaacagaatatctttaatgcacgcggatcaagattttccggcataccatccagccaatattgtttagtaggattatctgtattagcaacataatgtctgtcatatttaatacctaaataattagctggtttaacataactagccaaatcggaacgttgttctgttactttaataccacctaaattggtcagaagattagcaactgttgaggaaagaacctgatcgtcaaatgaacgggtatatactccggaaaagacatcccatccatcattttcttttactgcaaacatctcatcagccgttaaaatcttgttacctttagccgcatcctcaaattcggtctgcgcagttgccttgtcgatgtttgataaacgcatagccagacgcatacggagtgaatttgcatatttctgccacttcacaggatcatattttacattgtcaaacgggtcgcatttaccttctgcctcaacaggtaggacagaggtgttgatagctgctgcggcttctttcaactcctttaaaatgaattcataatcatctttctctgagttgaaaacaggattttcccctaggaaactttcaataggataaggtccgaaattatcgacaaactcactgataagataggcacgccaaatacgggcaaactgctttacgttcgggaaaaattctttttcatgtgcagtggtagtggccgcttcgagttggttctctactgctgtaatagccaacgtcgcatttttaatactggcgctgagatcaggataataataagcagatgtataatcatcactatagcggcctacgttcagaaaactcatttctccacaaattctggcagcactagcccaattatagactactatacgttctgcagtaccgggattcatctgtgcctgtcctatagaattattcaatgcatattgaggttttacatattcctcaccggcagctgtgggattggtattgacttcatcaaagtcagagcaggaaactaatccggcgcaaaagccaagccccaaaaataatttattcattgttttcattgttctttttcttttttatgattagaaaccaagagtcacattaaacaggtaagaacgtgatgtcggagctgacgagttctccaaacctgttgcattagtgcttgtagcatatactgattccggatcaataccatccaaatggcttgaaatcatccatacattattcacagtgaaaccaagcttaacctgttggaacggagtctttttcaacatagatgacgggaaacgataactcaaggcgatgttacgcaaacggatgttggtagcatcataaatataagcttccgaaataccggcgcggcctgtagccaaagctttataataacgttctaaagaaacactttgatcatttaccttataaccattaccatctttgataactcccgctacaacgatatcctcacgtttaccgccaggagcagtacattcagaaataccactacgttgcaagttcatattggtgaatgagaaaatatcaccaccaaaacgtccgtcaatcaggaaactaagtgtgaagtttttataattaaatgtatttgtccatcctaataagaagtcaggctgttgttcaccaatcttatgcttgtcactagtggcctgtggcagtcctgattcattgagtaataattgtcctttaaattctccttcttctactcgttgatatttggtaccccagatttcaccataagcacctcccgcaactgcatagacctgcaatgcgtcagaacctcctaaagcatactgcatacctggttttcccggcaataattcaataatcttactcttgttctgagagaagttcaattgagtatcccaactaaactgagttgtttcgatagggcgtgcattcaacatgatttcgataccggtattttgaatgttacctgcatttactttcatgttatcataaccggaaaggttatttaaaggaatattcattaactggcgttttgcgtttgtcttgtaccatgcaaaatcaactcctaaacggttattgaagaatttcaattcagcaccggcttcccaagaagtaatcaactcactgcgtacatctgcatcgtatttagtttttccttgtccggcagttgtattgccattagggtctgaaccaatactatatgtattatataactgatatgcatccatatcgttacctacttgtgcgaaagatgcacgtgctttagcataagtaaaccattcgggcatacctttgccgactttacccaccatatcactgatcacccatgacaatgaaacagacggatagaagaatgaacggttttctttattcaaagctgatgaccagtcattacggaaagttgcatccaagaatgcccaaccattatagttgattccaagagttccatacaaagaattgatttttttatgaatataggtttcggttattgacaaatcttttttgtcaccattggctagagagaataaatcgggcgcagtcaattttcccatagcattgtccaaacctgtagattttctttccattaagttaccaccaaaagagaaattgccaccaaattttccaaacaattcatctttatggccactgatcaaaaagctgaaattattttcgaagaactttttctcgctagtgctataacggctgttcttattattagtaggacttcctgcatacaacttctcttcaccctcagtgaaatacatatcactaccggctttgatttcagcatccagccaatctgtgaatttgtacttcaatgatccgttcatcaagaaacgattacggctatctttatttggattataatctttggaccagtaagggttgattccccctttactccaccagatcatttcgccatattcgtctttgacagggctggaaaagtcacggatatcaatagtcgtaggcatattgaaaatagtataaaatgcattattcccacgtgcaccactgataggacggttttctgcgagggtattgatgtattgtacttttgcatcgatgctccaacgatcatctttaccaaaagtagaagatgcacgcaaagttaagtttgtacggcttaagttagcgcccggtatcatgctggagtcatccatacgattcaatgaggtgtaaatggatgttttatcatattgctgctggaatgatatgctttctgataagttcacacctgtatcaaagaaattttttacgttatcaaagatttgcatatttgcagttgtaccatcccattttgtatagctttgccctgttacttcaggtccccagctatagccgttagttgaatcgaacacaccattctcaccttgtccaaaggtcttttggcgtttagggagcataaatgttgtctcagcagaaactgaacctgagatggtgatacccaaaccttcacgctttgttccttttttagttgtaatcaaaataacaccattaccggcacgagaaccataaagtgcagcagctgacgcacctttcaacacagacatggactcaatatcttcagcattaatatctgaaagtccattacccatatccaatgtcgggttatcaatatcattattacttgctcctgtaaagttatccattggcacaccatcgacaacaattaacggctggttcaaacctgttacagaattcgcaccacgaagctggattttggaagagccaccaggaccattgcttgaacgaataatctggacacctgaaactttacctgtcaaagcatttgcgaggttcgtttcacgagcttcaagtaacgcgtcaccctttacctcctgcatggcataacctagcgcttttttctcacgtttgataccaagagcagtcactacaacttcgcccaatgtttgtgtgtcatcttgtaaagttacattcatgggttgtccattccaaggaatctctactgtttgataacctacaaatgaaatttgaatgatatccccttttttcacattggataaagagaagtcgccatcaagtccggttatcgtaccattagtcgtacctttcactataacagacgcaccaatgacagtttcacctgtagcgtctactacaactcctgtacaagctccattttgttgtgtgattttcacaccggcaacgccaggattggcgaccgcgtatgctgctccggtagaggcacccattaggaacagcaacatactgactgattttagtcgttttaacatagctgtgattttttaatatttattgaaaatcagataattacatcttcttagttccttcagaactgtccttataactatagacttgataatcaatgcttttacatatcatcacttttggaatatacctttgtcatagagcgtataaacaagaaatgattttaaaatttctacttattttctactaattgccatattaaattgttgccatgaaccatgtcaagtcagaacatgatataatgggcaaaacaaaaatacaactcttatatttgctcaatccaaactttattgcgttatttgcgttacatgttttatgtaacataaaaactgcaatgaagagtatttctactaatccatttttaataaccggttaccaagggcccgactatttctgtgaccgcgaaaaagaaacagcttctttaatgtcagcattaaagaatggcaaaaatattacattaatcagtccgcgccgtatgggaaagacaggactataaagaatgtattttactatattcaaaaagaaaataaatctgccgcctgtttttatctggatatattttcaacccagaatcttcaggagtttgtatctctactgggacgaagtgtgttggggaaattagataccttatcacagagtaccttaaaatcgctattctcattctttaaaagttgccgtccggtcatcagcgccgatgaaattacaggaatgccatctgtaacactcgactttattccggaacgttcagaagaaaccttgaaagagattttcacttacctaaaccaatcgggagtagaatgttatatagccattgacgaattccagcaaataatggaatatccggagaaaggagtggaaggcctgttgagatcgtatgggaacagttactcatggcagtgttcaagcaattgatgtcaatgcacgcttccaacgtgttaatggtgaacagaatttagacctttcggtctataaatatggtaacggagaatatttactatacttatgtaaaaagaaagttgaagagttttcgcaatgcaaagacattagttaatctttatcctaaaaacaaacaagagaatgtgaaagagtttgtagatataaacaatgtcaattttaaaaattcaaaacaaatactgaagctactgtatcaattctcaatcaaatagaaaaagataagataatttttttgcccaatgttatccatcatcaattaaatttgcttttcgatttggaattcagataaaaggaattagttttaaaggaaataaatccccttcattcttaccactaataataggaaagaataagaggatttattttaagaaaatttcaatctataaaaactttcagtttctatttttatctgaaatatcttttcagaatcaacttatttgatagcccaccaaagtggcgtcatcattgtattgtcttctgcacctaataattgcaatgcattttggtattgttctttatctgcgttttctaatgctgtcggataccgcatacgttgtgtataatgataccatttctgaccatttttccattctgaagcctgaatatatttctccatgtcagaaccggtcagtgtaccttcattagctggaatttcaaagaaaggcaatcctaaacgacgacggtcattccacatttcaactactccataaggcacattagcaatatacttttgtgtaatgatcttggttagttggtcattcaaagcaccacctttgtataaaatcttactggcgtctggataattataagtcatttttccagcttgcttggtataaccattcacataatcagcttcaaaagaaaccggttctacggtatgatcaaaatttactgaagtacctacacggttatagctggtagatgccagatattgatttacatattgacttaggccaaggtattcgaaattggcacgtacaccgttttcatacgcttctttagcgctgatggagttggtccatcctcttaaagcaccttcggccaacaaaaaataggtttcccatggtgacatccagatacgtctggcggtgttatcacgatattgtttacccagcattggagtagtatcatacatactgcctaaaacatcattgaatttgaatgtctcagtactccatgcggaacgagtacctgccggataaccattccatgtgaactgagcgtcaatctttactagttttttttcaggatcagtcggatccagcatggcatgttctgcatgattcttaacgccttgcgaaccttgatctggaaaattttcagctttttcatcattcgttaaacaccatactttcaaagcacgcggatcaagatgttcaggaataccatccatccacaattgtttggttggattatcagtagttaccggataatgatttacgtattgttcaccaatataattcataggcttgatgtaaggcgccaagtccggacgataactggttacaggaatatctcctaaaccagttaacagattacacatagtagaagaaatacattggtcattccaaggacgattcattacaccttcataacaagaccatccgcctgcctctggaaacgaaaagaaatcatctgcagaagtcaacaaacttttggatgcagcatccgcaaattcagccttgacatcgatttttgaagtagatacttcggacaggcgcatggcataacgtaagcggaggctgtgagccaatttgacccattttgcagcattgtatccaaaagcaggatctcctttagcttctgtttctgtaggttctacagacgtgttaattccagcggctgcttcttttaattcggtcaacatgaatacataaacatcttctacgctgttgaatgtcggattgacaccttgagcagcgtccaaagcatatggaccaaaagaatcagcaaaatctgcaatcagcataacacgccaaatacgagcaaattgttttacattaggaaagaaagcctgttcatgttcggaagttcccggatttacatctgccatattgatggcattggtggcatattttacccaattggaggtataactatacaatctgtcgttatactcattgctataacgggcggttactcccatagtgttatcaccaataattcgtgtaatggaagcccagttatacacaaatacacgttctgcaatatccgggtccatttgcgcctcataaaaagatttattcagtgcatagtccggatgaatatatgattcgcctgctgcagagggactaaaattgatttcctcaaagtcatcacatgatgtggcacctcccatcaaagcagcacccattaccagactgaataataatttatttacttttttcattgttgtcgagtattaaaaattagaaaccaagtgttacattaaacaagaaggtacgtgatgttggtgatgacgcattctcaaatccggttgcattggtactggtagcaaacacggattcggggtctatgccatgcagattactatgaatcatccaaacattgttgcaagacatacctaacttaacttgctggaacggaccttttgcaagcatcttccgggggaaagtatagtttaaggaaacattacgtaaacgaacattcgttgcatcatacaaattagcttcaccaatacccatattaccagttgatccagttacggccgtccaataagattgtggttctacttcgatggtgctaggtgaatagcccccgtttccgtctgcaataaccccatctactacaaatttatcgcgtttaccgtttaccacagtacatgctgccacaccattggcttgcaacattcggtttgaaccagaaaaaatttcaccaccgatacgtgcgtctaccaagaaactcaatgtaaaattcttgtaagagaatgtattggtccatcctaccaaacaagtagcttgttgatcaccaatcttttgtatttttgagtcaccttgtggcaaaccggcatcattcaacaacatttttccataataaggactattctcatcagtcacccgcagataagtagtaccccaaatttcaccataattacctccagcaacagccaaaatctttaaattatcataggtacctaaagtatattcgttaataccatcagctagttctataatcttgtttttgttggtagagaaattcacttgagtgtcccaagtaaattctttagtttgtaccggagtagcattcaacatgatttctacacctgaattctgaatattaccagcattaattttcattgaactaaatccagacaatgagttcataggcaaatttagcaactgacgtttagcgtttgatttataccaagccacatctaaccctagacgattattgaagaaacggacttcggcaccggcttcccaagatgaaatcaattcgctacgtacatcttcattaaataaggtactaccagacacagacgcactcgtacctcctgtttcatagatagatccaataccatatacgttatataattgataaggatcgaggtcattacctacctgtgcaaaagatacacgagccttggcatatgtaaaccactcgggcattccctttccccggttattaatcatatcacttattacccatgaagcactgatagaaggataaaagaacgaacggttgctcttactcaaagtagaggaccaatcattacgtcctgtcaaatccaaaaatgcccaaccgtcatagttaactcccagtgtaccatacaatgaattggtcttacgatgagtataagtctgactgatacttctgtttgagtcggttgaatttgtcaaccagaataaatcaggcactgttaaagcactaacagaattgctaacacctgttgatttacgttccattaaattcccaccgaatgtaaacacacctccgaaatcgcctaatacacggtctttttgtgcggtaaccaaaaaactgaaattattttcatagaatttttgttcaccaaaagaataacgaccgttttctgatgaaggactgccagcatacagtttggtttctgtttctgtgaaatacatatcactacctgctttaatttctgcgttcaaccaatctgtaatctgatatttcaacgaaccattcagcaaaaagcgattacgtttatcttgattggtattgtaatcttttgcccaatatggattctgaccactgcctttctcccaccaatacatttttccatcttctggatttttggcctgtttaaactctcttatatccaaagaaataggcatcatgtacatggaatagaaatagttgtccgagcgcgcaccggatataggacgattggtagcatcagacaaaatatattgtactttggcatccacactccaacgattatctttaccaaatgacgaagtgatacgtgacattaagttagtacggctatactctgcccctggaatcttgctgaaatcgtccatacgggtagctgataaataaacggatgtcctatcaaactgttgcgaaaaagcgatattttcagttaaattcacacctgtcttaaagaaattagctacattgtcaaaatattgcatattttgagtacgtccgttccagtctgtatagctttgacctgtaatagctggtccccagttagaactagaggttgcattgaaaatgccattagaaccttgaccgaaaatagtttgtcgttcgggtttcataaatacattttccaccgaaacggatccggaaaatgtaacaccaagcccctcgctcttagtacccttctttgttgtaatcaggataacaccattacctgcacgcgaaccataaagcgcagcagcagatgcacctttcaaaacagacattgattcaatatcttcggagttgatatccgataaaccgttacccatatcagtagatggattccacatatcattgttgtcggctccagtaaaattatccaagggtactccgtctacaacaattaacggctggttcaaacccgttacagaattactaccacgaagctgaatcttagaagaaccggcaggaccattacttgaacggatgatttgaacaccggatactttaccggaaagagcattggctaagtttgtttcgcgagctgctaccaatgcatcaccttttacctcctgcatggcataacctaatgctttcttttcgcgtttgatgccgagagcggttactaccacttcctgtagcgtttgtgtgtcatcttgtaatgttacattcaaaggttgaccattccagggaacttcaacagtctgatatcccacgaatgaaatttggataatatcccctttcttcactccagataatgaaaagtcgccatcaataccggtaatagtaccattagtcgtacctttcactactacagatgcaccaatgacagtttcacccgtagcatccttgacaactcctgtacatgtaccactttgttgtgtgattttcacgtcggtaacgccgggattggcgaccgcgtatgctgctccggtagaggcacccattaggaacagcaacatactgactgattttagtcgttttaacatagctgtgattttttttaagtttattgaaaatcaagtaattccgtttcattagttccttcagaactactcttacagctatatatctgaatatcagtgtattttatttttgtatctcaaaaagaaaaattgtatttaaaagtctatagaagggcttttaaatacaattttctatctattttctaccgaaaagagtactaatatagaaaaccgaacaaccataatggtattttattatttattccatactctatatcatcagcaacaatatatgcatcagaaagtccatttatttgttgtttacctttgtttctaccaccgacttcaaaagtatagcgtccatcaataaagaaatcactctctttagaaacgtttattttgtggcaataacgcaattggttggcaaaaaaagtttccctgacatttccaatatcaatttgactggcagacaatgcatacattaaattaggattctctaaaaacagtttatcaggtttctgcaagcggcttatgccggagccttctttttggagattcatagtcagacagctgtcatggagggcatccagataggccagcaatgaattacgcgagattcctatccgttcgcttagtttgctgacattaggaataaaaggcgccgactctgcaatgatatatagtaactgcttaattttagttgtatatgaaatatcaacccctcttaactgtggaatttccaattccacaatcagattgaccacttcatttattcttgaataataaagagcgggtaattcattgtaataaggataatacccatgtttcaaataatcaggaaaatgtttcagaactttaactttgtctactatcccgacagataatgacagatgattatccaatatattatttaaagttaatatcggcaatgatagtttttcattccagtttaaatactcgcgaaaagaaaaaccttgcatttcataaacaattgcccgccggctcaaatccgatttggcatttaagatttcaagcaaggacgaacctgtaaagactacatgaagttcaggtaagtcatcataaatatttttcagttcttgagaccagttggggtatttgtgtacttcatccagaaatagatattttcctccccgctttacaaaatcggaagctaaatcataaagtttatgttcactgaaccagatattatccacactggcataaagtacggttttatccattggaaggttcagtttgatatactgcaacaataaagttgtttttccaactccccgggccccctttatacctataagacgagctttccattctatctcattcatcaggctacgtacaaaagaagtatttgttatagccagtttcttgataaaggactcaaataatcgttccatttcttctttttgtttatcacacattacaaaaatagtaataaattgttcatcatgataaacaaaatgagtttttttaaaagttgcagcaataaaatgctcacattaccatttgtttaaataaagttcagaccttcgcccaagtgtactgcccttttttatttggcttatgttaagtggctctatgacctatgcataatatgctttgccgatatcagaatatcaaatgattttgggtataataaaaaaggaagagaatatatcacataacctcttccttttttattaataaacttggactagcgtcatatttcagactgtttttccattaattcaaattaggtccttcaccaaattgcggagcttttttatcataccaaactcgttctgtatttagtattgtaggttccggaccataggaatatccttgatcttgatatgcttttctcttgatatctcccattttatcatctacagttggttgcgtcacttgaaatctacgaggtaatggatagttgcttactttaggatttaagttcagcatgggatataaatcactttctttcataggacatccggaacgacgcatcatgatatattgatcagccgggaagaaaataaagtgaatatactgttgcaagtatactttttccagattctctgtagtagatccatctaaagtcaagataggatcatttagtaatctagtgacttcattttcctgcaacttaatggttacatcaaatttgtcttgcccaaatgtattgtcataataggggatatgatttaaacctgctaacttgtcataagcacgcattgaatattctactccctttttcagataggattctgcgcttcctgaaaaaccgatatcttgtccttggcttagtaacttaagttctgccagatacaagtttacttctgctgtggatagatacaatccataccatgcgtataaatctgtaatctgaacttttggcgcacctggagcaaccggataatctataatgacttttttgtcaaacatatattgatttaatggagaatatggataataagttgtttctccattgccgtccttatctgaaactttccacagcttaccagctttgtcaaaataatcaacatattctgggtgctggtcggctaaaccggcttctacttctgtcggtaaaccgtaataacgtacccaaggttcaccaggagctttccagcctttgaaaacctttttgccgttaacttcttctgatatgacattttcctctacaaatgaaggtagtctttgtcctttgtcatagaacgcttgtacgacgattgaattataatcattcttttcgaaaaagacacggatacgtggatcaaaatgttcaagcatgaagttgattaattgcattgatcctgcaccacggttatccatagaatttccaccaggcatatgacggtctgtagcacttttattatagaagaaatcatcttccaaaccatccataataggatacttggcagcgtctcttacaatattcagtgcccgattcttatcctcgttaattaaacgaactgctagctttaaacggagagagttggcaaatttcaaccatttggtataatcgccttggtagatgatatcctgtgagcctaaagactgctgtgttactttatttccatcaatagttacatcattggctaatgtttcaacagtttctttcaattgtttttcccacaaatcaaacaattcagcttgtgtgtcatattttggagtgagggttcctccgtaacgtgcttgataggcttctgtgtatgccatggagccatacatatcagtatcccacatagccaagtaaatcattaaaggttgacaaagtgcttttagataagtatattttgcttgttcttctccctctaaagttgtatttacaatataagtcagttcatttacttggttcattacattgtaaacttgtgatcccattttgcctgaattggacatagtagtcatcaggttttcattacctcctgttgaagctactgtttgagaccatctcagcatattattgtaatcgtaataccaagcaaaatagtcatgaccatcaaaatttgctaatgcttgagtaaataaatagcgagggtctggttttgaaacgatagttggattggtattgatatcggcaaaatcatctttgcagctgcttataaaagtacagctgccaattaaaaagcttgccattatatattttaatttcataatcttcaattttttataagtttagaatcctacatttatagtcattgtgtaattagctgtatatgggtcgaaactacgaatacggaattcaccgctcaaattaccacgcacaccttcaggatttacgtcgttaggtagtgagttatatagatatcctagattacgtgcagagaaacttactcccaatctttttgctccaattttgccggcaatatttgatgggaatgtatacccaacggtaatttcacgtaaagcaatatatttcaaatcatgtatccatccgtcatttgttacacctgttgcccattggttggcataattataatacgatgcagcatgcattggttcaagaattccattttcataagcttgttgataggacatacctcctacatcatgagttttaccatctatacctgtaacttgagtccccgaagcaaatattccttgagggatcataccatcatgataagtaacaccgtaacttcctgattgacttccatccgcatttaaatattggctggtccatgtcataccgccatgagcctcatctcggaattttaaagaagattctgtccatccataagctgtaccataacgattaccataaacagctactttaccaccaaaacgcatatccaaggccattctgaaacttaagtttttccaagttaatccggtcgaaacagaacctaagaagtctggattcatatcaccgatcacttcatttttcaagcttctatcagcataggcagaacggtcagaatcgctccatttcagaatgatattgccgttgtcatctcttttaggagttatatcggaaatcaatacgccataaggtccgccaactctggctgccgattggatacgcatgttaccccatcctgtagaaccacgtaagccaatgtattcggcagcgtcagggtgtaattcgataatcttgttattattctttgtaaaggtgaaatctaagttccattcccaatctttattacggaaaggaatcgtatttaaagctatttctacaccactgttttgaatattaccagcgttaattaactgattgctaacaccagaaatagatggtgtagagatgttcataatctgatctcttgtattttctttatagtaagttgcatctaggttgatacgattgtctaggaaacgtaaatccagaccaacttcccaagcgtttttccgttctggttttaagttaggtgaaatggctgtgcttgagaatgaatttgtatatacatagctaccatctattaactgtaaattacctacattgtaaccggaattaatagtgtaagcacctgtatcattacctacttgtgcccatgaaccacgaatttttgcaaacgaaatccatgaaggcattttgtctttgaatgtttcactgatcagccaagaaccggaaactgaaggatagaagtatgagtaattaccgttcttattagcataaactaatgctgaagaccagtcattacgcccggttacatctaaatataattgatttttccaagaagcattgaaagcaaatactgcagataacatccgtttagttccttctatttttccgcttgctttgacctgtcgtttactgttgcctatgaaaaattgcccaggtacaatcaaaccatcagtttctacagaataagcagtctgatagttgttgtaatattcaccacgaataaaaccacccaaattgaaatcttttactgctttatcaaaagtaaaagttcctgcaaaggtggtttgttctttagtttgttgtgctaatttatagttacctccttcgtaagcaactccggtaccaagttctttattttcttcacgaatgtatacatagttcatattgccttctcctttgaaacggacccaatcggcaatttttacattgacttctaaaataggacgtactacggtttctttacggttgtagtccatattgtcaatattaaaccaataacttttgctggattcgggtacattggcataagtatctccagaacgtgcaataccaccttgttcacttaaatatttatcacgatagtacttagcatcatataatggggttaatccttggtagaaatattcacctacggcacgagcagcattgcgtggcttagaattggcgaaactgacagatgcggcaacatctactctatcactgattttatggctaccttttaccaagaaagcgtaacgttcaaatgtattattaggagtggtggcattcactttcttgtaagaaacagaactatagaatgatgttttttcattaccgccacgtactgatacattagtattagtgttaaagcctaattgatacatatctaacatattatttttgattggagaataaggtactttacggccatcataatcttcaatcattaccgaactgtcgtaggggagtccccatcctaaagtagacgctccgattaatgaaggttctccctttgcgttggtataataagtaggaatccaagtattaccattttctccatatccgattctacctggacgggctccaggtccatatacagtttgaatactgggttgtttgtaggcgtggtcgatacctaatgtttgagtaacatctacaccgaatcctttgaactttcctccacctttggtggtaataactacggcgccgttcaaacctctagaaccataaagcgctgtggctgcggcacctttcagtacagatactgtttcaaagtcatccgggttcaagtttttcaattcattaccataatcaattgcatcaatttcttcaccatccatatcacgtccttgagtggaattatcaagaatgacaccatcgacaacgtatataggctggttattgcttcctaaggttgacgcaccacgaatttggattttagcagaaccaaagataccaccgtctgaattagatatctctacaccagctacttttccttgtaatgatgcaaccggattgactgtattggtatataactcttcactttttaattcggttactgcataacccaaagctttttcttcacgcttcattcctaaagcggttacaactacctcacccaacaattgagtatcatctttcaaaagaacatctagaggttttccggtccattttatttcttgagtagcataaccaacgaaagagataacaatgatatccccttcctttacattacttaaagagaagtcaccgtcaagccctgtgatagtaccattcgtagtccctttcactactacagatgcaccgataacaccttctcccgtagcatccttgacgatacccgtacatgtccctgtctgttgtgtgattttcacgtcggtaacgccgggattggcgaccgcgtatgctgctccggtagaggcacccattaggaacagcaacatactgactgattttagtcgttttaacatagctgtgattttttttaagtttattgaaaatcaagtaattccgtttcattagttccttcagaactactcttacagctatatatctgaatatcagtgtattttatttttgtatctcaaaaagaaaaattgtatttaaaagtctatagaagggcttttaaatacaattttctatctattttctaccgaaatcactactttgtacaaacaaataagggagtattatattccgtaaaagaataagaacttccaataattgattgggaaagtttttcatcttacaaatgaaaatagcatcggttcattgttttaaaaggtccttatctttttcaagaagaatcaattctctacttgcatataaataatatttgcaaaataattctatgtatagtcctgagggtcaaaataaaacaatccccttgttcttacaggaaaaacaaggggaactgctattctttaattttattttcagttcttcggtccgttaccaaaatcaggattttctttatccatccatacacgttcgtcatgcaaaacctgtggattctttgcatttgtaccttgatatgtataaccttgtgctttatatgcagcgatagttatgtcatgtaactgatctgattccaaaggctccgtaacagcaaatcttctaggaataggataggaatcacccaattgttcgtcaaattccttacgcggtaaaagggaactatttttcataggaacaccagaacgcataatgttaacatattgatcaatcggtgcattaaaataatggagatattcttggatatacactttctccagatcagaaactttatctccacttaaaatataagcctctttcttaagcagttctgtcagccattcatcttgcagcttaatagatacatcatgaggatcatttacgtagggactgtcataataaggtatatgattctgactggcaacataatcatatccttttactgaagcagtgataccatctgtaaaatactcttgggcacttttttgtccattccaagtggctcccaacagggtgaattcagccaagaagaaattggtttccgctgccgaaaaatacagtccataccaaccatattgttgagtgtcttgaaccggagtaacatccggggcatccggataagtatatgtcaacagaccttttaccatttcttgattccggtaagtacacggataatagcttttcttggcaccagctgccgagtacaagacaaacaattgtcctgtgggatcaaaataatcctcgtatttgtccatctgccctgcacctatttccacaggaaggccataataacgtacccaaggttcacctggccccccccattctttaaagactttctttccgtctttaacctcagaaattacattcttctctacaaaatccggcatttctcttttttgatcaaaataagcctgtacaacattagaattatagtcattcttttggaagaaataaagcaaacgcggatctttgttgtttactaaaaagtctataagatgttgcgtacctactcctacagaaaaatcattattccaattgttatcgaacttacccttgttatatacaaaatcatcatccgtagtagcaattaagccaacaggactttctgctacctgttttactatttcaaaagcgcggttccgatctttgtttatcaaacgggctgcaattttcaatttcaaagaattggccagtttgccccattttttcaaatcacctttataaataaagtcctgattattcaaaacatctttgatttcattactgctcagataattaatagtctggtccagttctttcagccatacttccaaaagttcctcttgagtgtcatatttaggcaataacaaaggaggattggtatatctggcttgttctgcttctgtatattgacgtgatccatataggtcagcatcttggatacttaagtaaaccaacaaaggattacaaagatattggatgtattcataagtcgctttttcctcttcaggcaacaggctgatttgatatcgaatctcattagcataacgaagcacttcgtttacttcataaccacaaccattggcttcatcagtcggacgatttgaacgagttgtattacctcctgatgaaactgttgtttgcgaccaggtagaaaggtcattaaatcctccaaaccattgtgcataatctcccggttggaaggaagcttcacatttagtgaacaggaaacggatatcaggctttgtaatagtagacggatctgaatttaattcagaaaattcatctacacaggaagtgaacattacacttcctaaaagcagtgcggctgctaaagttctatatttcattgttgataattcttttaaagttaacaattagaaattggcattaattgtaaatatgtaacttgctgtataaggttcgaaaccacgaatacggaactctgaagctgaattagaacgtacagattccggatttagattattaggtaatgaattatacagatatcccaaattacgtgcactgaatgataggttcaacccttttgcacccaatttatgactgatgctattaggcaaacgataatttacagtaatattacgcaaagcgatataactcaacttgtgtacccaaatgtcatcaattgtctgtgctccccatgcataattatttccataccatgaaccggcatgagtgggctccagttttccttcctgtaccaactgtgcgtaagacagaccgctgacatccatttttgttccatccaccaaggtcgcaattgttccttctttaaaaacaccttccggaatcataccatcagtatattgaatacctttagaatcggcatattgactagtccaagtcatacctccatgttccggatcacggtattgcaaagagctttccgtccaaccggcctgagttccgtataagttacagtaagatgccaccaaacctccaaaacgcatatccagtccaatattcaaacttaaatctttccaagttaatgttgttgctacagatcccagaaaatccggtgtcatgttacctactacttccgctgttttgctttgtgctctatatgcgcctctccaactgtcatcccactccaacaaaggtacaccgttttcattacgtgcctgagtgacatctgacatcaacacaccataagactcaccgacttttgctacagagccgatatgatagtcgtatgcgtttacataaccggacaattcaatatagttggcaacattaggatgcaaggatacaattttacttctgtttcgtgtataagtgaagtccagatcccactgccagtctttagttttgataggagtggtatttaatgcgatttcaatacctgagttttggatattaccagcatttaccaactgttgggtaacaccggaaatagcaggaacattgattttcataatctggtctgtggtattttccttataataagtgaaatccaaattcaaacgattattaaaagtacggaaatccaaacctatttcccatgaattcttacgttccggtttaaggtcagcaatcttcatcagtttgtccaattcattggtatagatattgccgtcatacatttccattgtggcaaaagaatacgtctgattgactgtatatgggtctgtatcattacctacttgtgcccatgatgcacgaagttttgccaagttaatccatgaaggcatactttcacggaaagtttcattaatcaaccatgaacctgatacggaaggatagaagtatgagtgattacctgtacgattggcatataccaatgcagaagaccagtcattacgtcctgtaacatccaaatagacttgattcttccatcctaaatttaaagcaaaaatggtagaaataattcttttgctacccgatattgtcgcttcgctctttttagtcttttttgagttctccacgaaccattctccaggcaccaccattcctccgtcagttgatacttttgaatgtttggaagaggtgttgtaatactcaaatcgtgcgaatccaccgagtgaaaaatcttttatctgcttgctggcagtaaaagttccccctacggtaaattgttcttttatatcttgcgtaataccataataccctccttcgtttgcataaccagaacctaattgcttatcttctattgaagtataataacggttcatattagcgtctgctttaaatttcagccaatctgtcatctttacatttacttcaaatgtaggacgaataacagtttccttccgcacataatcataattatctactttgaagaaataatttttagcgctggaaggaaccgaaccatattggtcaccatagctggtactagcgataccaccatgctcacctaaatatttgttccggaaataatctacgtcaaatagcgggttaatcacattggtatttgcattgacaaataattcacccgcattcagttgtgcattacgcggttttgagttggcaaagctaaaagaagcggcaacgtccacccaatcgttcaacttatggctagctttcaacaacatggagtaacgctcaaaagtattgttttctgttgttgatttggcatttttataagataaagatgtataaaatgatgttttttcattaccaccgcgaatagaaacattcgtatttgtattgaaccctaatttatataaatccagcatattatttttacgtggagaataggtagtccatgtaccatcataattgcggatttgagagccatcatatttaggtccaaaaccaaagttgggtacccctactaatgtatgttctccattctgatttaccgtaaactgatgtgcatcccatatacttccattttggtcggcatcagattgtcccggcatatatccaggaccatataaagtttgaatatccggagtcttgaaagcatggtcaataccaaatgtttgagaaacgctaatacccagtccttgcgtacctttaccggatttggtagtaattacaaccgcaccattcaaaccacgagaaccatacaatgctgttgctgccgcacctttcaatactgatacagtttcaaaatcatcaggatttaagtttttcaactcattaccataatcgctggcgttgttggcacctgcatcccagtctgctgtcgtattaccagatacaccgttatctaaaatcactccatccaccacatagataggctggttgttggaacttaaggttgaagctccacgaatctgtatcttggtaccaccaaataaaccaccatctgagcctgagatttcaacaccagctactttaccttgcaatgcggctaccggagaaatggtattggcagcttttaattcatctcccttcacttcagtaactgcatatcccaaagctttttcttcacgcttcaatcccaaagctgttaccacaacttcacctaactgttgcgtgtcatcttttaaagttacatcaataggctgtccggtccatttaacttcctgtgtctgatatcccacaaaagagatctgaatgatatctcctttttttacatttgacaaagaaaagtcaccgtcaagtccggtaatagtaccattagtcgtacctttcactactacagatgcaccaatgacagtttcacccgtagcatccttgacaactcctgtacatgtaccactttgttgtgtgattttcacgtcggtaacgccgggattggcgaccgcgtatgctgctccggtagaggcacccattaggaacagcaacatactgactgattttagtcgttttaacatagctgtgattttttaaagtttattgaaaatcaagtaattccgtttcattagttccttcagaactactcttacagctatgtgtctgataatcagaacatatttactttagtggttttaagatgatctttgtccttgaatttacaaacaggaaataaatttgtgatttctacctgttttctactagctattatcccgttatcatagtcaaatttaaatcaggatagggttaatgaatactgcattgcaatactttttgttctatcaccacatatcgctgggcttcaatattatacggtgacagaactttcagcattccctcgaaatggtttatcagttagagccggttcagcagatactggtcgccatagtgggtacgtaattttttcactcccatcagggctaaatgttttccgaagactctcatcttgacatcacgcatggtttcgggactggcccttttcatcacttcataaatctgtccgatagtccatctttgaaacttctccccatcccggggcagactgaagcagctataaaaaaggctttcctctatggggcggcgcaaaaatgcgtcattacgtaaactgacagcctgttcttctgtgggtgagagccaatagcggcggttatgttttagttcatctcttaactgagcataaagttgtttataattgatgcgaggcaaacggatactccctttggtcatcaccggataaaaacggcggttaccggaggaatcggtcagcagatcgcaaaaattggaagtgccaataaatgaactaaggcgcggttgctggctatagctgctttgaaacggacggcgcatactaagaccgctcatttggactagattcttcagccgtgccagtttaccttcttccatccgattgaattcgtctatattgataagagccaaagagcgcattttgcgcagggcatccccctcgcgagttacatcgaagtcatcggtataatatccacgtaacgctggtggaaggagcgaccggcaaaaggtagacttcttcagtccctgaaggggattaaccaaaatgggaatcaagcagttgccatgcatccggtttttaccgctccattgcatcaccatgcccagcatccagatatgaaacacctccacccattgcgtttcatcgcttaccgagcgtgccagctcgcttactctgtcgtgtccgtcccagtgtggcagatgttccaaataggctgtcacggggtgaaaagaaggaatgcgtgacgaacccaaataacggcgcatatcacggtccatacagttcacaccttcttctattgcattaataaccaatgtattgaattctcgctcatccaccacacggtatttatcgaacttgtgcttgtcatgaaattcgcattgttctgttatttggttgtaacgaaaggaataatgagtggtgaggaacgaatcaagccctttcatggcttgtttcagttttgagtctttttctttttccattaaatctgttttttattgatttgaggtgtgaagatagttctgcaaaacagagttttgcaagaactttgcccgacaatttaaaataaatccaacgtgtgaaacatttacggcagaatctttgcaagaggacgaaagaatccgtatcttcgtccggaagaatctgggttctcactgacgtgaatatgccttctcactttagtgaagagccgttgccacacaggtgaaactgccgcttcactaaggtgaagcaacggaatgttttgtaagtttgcacgataacatcctataaataaaacaaatacatagtacattatgtcagacattaaatttgatatctatgaatctccggcaaatgacggggaaaagaaaaaataccatgtgagaaataccaacaagcagacgattcactcgaaggacttgatacacgaaactacactttatacttcagtaagccgctcggactgggcggcagtggtagagggactgatagatattctgtccgagaaattaggtgacggcaagcgaatccatatcaacggattagggtatttctctgtcagcatcggctccacagagagtgaaaatcctaagaaaatgacccgtggcacagtacagataacaggaatcaactttcagcccgaaaaaagtttcaagaagagtattataaaccgggcgcattttgtaagagaacgatacaaggtgcacacggtggacttgtcgcctatcgaagtagacgggttgctgagtgaatattttaaagatcatcgcagcatcacctgcgcccggatgcagcaggtctgcggaatgactcgttctaccgcttaccgtcgcctgcaaacattgactcaaggagagcatccgtcattacaacgcgagggctacaaaaatgccactgcctacataccggttaaagggcattacggacgttcctacaccgcagatcgctggtaacgagtcggatagggtgaagggaggattttgtgtttcgtgtaaaacgaattgttatatcatactttaaaataagaaaaaatgaaaagaaccatcttgaaagacgtaggaatcggcttgtgcttcctgcttagcaccggaacgatctacgcgcagaactaccatagaaaagtgaagaatgcgcaaggtatcgaggtgacctaccaatcgaattacaaagggagagtccggccgggacatttgttgatgaccgtgtccggtgaccgcgtatcattgaccaacgtatggttggagcaaaatgaccgtcccgatccccgcccggaagacaagacacctgtaaccggcagttacatcgactacaccacccggcaggcataccgcagggctgaactccccaacggacaagtgatatctgcggtcactcccttcgaattcggcaaaggcttcacgcaaacgggcgaaggaaaacacttagggatgaactgcaaaattttgcgaacatctatcaattccaacactatcgaggtatggtataccaacgacatcccttttcgtggtactccgcaagccaatgtgggtgtacctgacggattggtactgagggtcgtgcgaaacggtgacatgattcaagaggctacccatattaccccactgaagaaaggaaaggatgtattgccacagtcgtgggggaaaagcatggatgcggccgactaccaatataccatcaaccaaagtggagttatcacaattccggtcttcgaccaacagagcatctgcttcaacaacactaaattgcccgaagtactgaaagaaggtgtacaatacagtgctggaggcggcaccattctgttaaagaaagtgaagttacccgactatgtgaagaatcgcaccgtttttgcggaagttgttcaatactcggacggcgatgcttacgaccgcaccggttctgtctttctgataccggaaggcaagcggctgtcttttcttgatgccatgcgtgatttgaaaaaagttccctcttttcactcggaaaatatggcttaccacgggctgatttctacagcggagtatgatgtgcctttagaattgatgcgtttcttcaccggtttcggtgtgcgcaagttcaattataataaggtgaaggggcaggactgggtggactccgtactttacaaaatggaggtaaccccactggccgaaaagttggaaggagaagcttggattggcgcttacatcggcaactgggatgccaaagggcatcgtctgtcgttgaaactgaagtattatcctgatgaagaacatcgggtttataacactcttccgctgttcaatacagtgaattatctagagcaggcaggacagccttatccgattttcatgcgtcaggattctctgatcgtaaaattcaccttgaaggagcctgccaagaatgcccgtctgtactacctcaccacgggacatggcggttggggaggcggtgatgagttcaaccagaaacctaacaccctctatttggacggtgaaaaagtgatctctttcgtaccttggcgagatgactgtggaacttatcgtaactggaatccttgttcgggcaatttctccaatggactgagttcttccgacctgagccgttccaactggtgcccgggtacggtgaccaatcccgaatacatttatttaggtgatctggaggcgggtgaacacagcatcaccgtaaaaataccacagggtgctcctgaaggggaaagtaatagttattggtgtatctcgggtacacttatttattaatgtaaattcttttgtcctgcggtaacagaaatgtttctgttaccgcaggacaaggagtgttccaacttttctatctcctcaagggacaactttgtgccctatgcaatttgccccatagcaagttcaaggacttaagattacgactacggcttattgggacttctttctctcttccgctattcctttctatgttcttctattccttcttccaacttggcagaatccaacatatcattctgaaccatcaagacgttcatatactcgtcgtatgtatggcattcctaaggaaagcatatagcacagcagccaaacacaggttcaatcaaagcgaatatacccttcctgcaattctttcacattttatagataaaaggtatattttctctagcaatagacaaacagcatgaactgacatcacctgttttcttttggttcttatctcaataaacgttacctgttttctaccaactaccaaacaaacggtaaatattcaatgaaaaaacaatataaatcatttcaagaaagttccgtaaaagttaccagttctctctttaaataagatgctttgaacatctcaaacgttaaaaatcagggcatattaaaaatatttttcaagagaccctttatatatattaaaattgttatatatttgcatcgttaatctaaattaaattgaaaaacatagttctgaaggaactaatgaaacggaattacttgattttcaataaactttaaaaaatcacagctatgttaaaacgactaaaatcagtcagtatgttgctgttcctaatgggtgcctctaccggagcagcatacgcggtcgccaatcccggcgttaccgacgtgaaaatcacacaacaaagtggtacatgtacaggagttgtcaaggatgctacgggtgaaactgtcattggtgcatctgtagtagtgaaaggtacgactaatggtactattaccggacttgacggtgacttttctttgtcaaatgtaaaaaaaggagatatcattcagatctcttttgtcggttacattactcaagaggttctttggaatggtacccctttgaatgttattttaaaagatgatacccagactttggatgaagtggtagtcgttgcatttggaacgcagaagaaagtgaatgtgaccggtgctgtatctactgtcggagcgaaagagattgcggcacgtcctgttagttctacggttgaagctctgcaaggagttgttcctggcatgaatatttcaacaagtagtgatggtggttcattgaaaggtaacaaagaattcaatattcgtggtacaggaactattggtaaaggctcatcagtatctcctttggtgctgattgatggaatggaaggggatattaatgctattaatccacaggatattgagaatatttctgttttgaaagatgctgctgcgtcttctatttatggttcacgtgcgccgggaggtgtcattttgattactactaaaaaaggtaagtcaggaaaaccatctattaattataataataatttccgatttaactctccattgaatatgcctcatatggcagattcatacagttttgcattagctatcaacgaccagctgaccaatggaggacagtcgccaatgtatagtgagaagaaattgcaacaaattttggattatcagcatggtaaatctacacaatatatgtgggctacggatgctggacgttggaatgcatttgatgacccaaatcgtcaggatgttatgccaaccgctaatactgattggttgcatgagttgtttggtgatagttttactcaggagcattcaattagtgtaaatggtggtacggatgtaatgcagtattatatgtctgccaattatctggatgaaggaggattattgaaatatggggatgatggcagacaacgctattcatttactggtaaaatcaatgcggatttggcaaaatggttgaaagtagggtatagtgttcgttttaatcgtattgattatagttccccttcctttgcaagtgccggcgagaataaggaaaatgtattttattttgatgtatgccgttattggcctgtaattcctgttgtagatcctaacggtttttataccgcagagtctaaaatttaccaattgactgaagggggacgttataatactcagaatgacgttgtggcacaacaactccagtttcttattgaaccaattaaaaattggaaaaccactattgaattaaattatcgtagtaattataatttctcgcatacggattatcaaacggtttatgcttatgatgtaaacaagaacccatatgctattgccaacacaacttcgggagtaacagaatatgcatataaaagcaatttctttaatccgaatatctttacagagtattcattggagttagaaaacgggcataatatgaaagcaatggtcggttttcaaagtgagttgtttaaacaacgtgatattactgcaaaacaaaataacataatgtctggcattcctactttaaatacaactacggataatgcacgtgccagtggtggctatcaggaatgggcaacagccggtttttttggtcgtatcaattatgattacaaaggtcgctatctggttgaggcgaatctgcgttatgacggttcttcacgttttttacgcgatcaacgttggaattggttcccttctttctctttaggctggaatgtggcacgtgaggccttttttgagaagtatactaatattgtcaatacattgaaagttcgtggctcatggggtgaacttggtaatcaaaatacagataattggtatcctttttatcgcattattgattataaacaaaataatggcggttggttggtcaatggcttgaaacctaatactgcagccgagtccagtctcgtttcggcattgttaggttgggaaaagacccaaactttaaatattggttttgatcttggtatgctggacaatcgttttaatttgaattttgattatttccagcgtaagtcaattgatatggttgggccgggacaggaattaccaacaatcttaggtattgccgttccaaatgtgaataatctgaatatgacttcgaaaggttgggaattacaagtaagctggcgtgatcagatacgtgatttcagatatggtgtcacattggctttatccgacaaccaggttgtaattgataaatatcctaatccgtcaaaagatttaggccaaacatattatgatggggcacatttgggagatctttggggatatcagacaataggaatagctaagactcaggcggaaatggatgcgcatctggcgaaggtggaccaatcttctatgggttccaactggggagcaggtgatataatgtatgccgatttggatggtgacggtgtgataagtgcaaaagataatacagcagacaatcatggagataaagttttgctgggtaataagacaccacgatataactttggcttgaatttggatgcggcttataaaggctttgacttgaaagtgttcttccaaggaacattgaaacgtgactatatgccgggatcgggtgctgaaagtatgatgttttggggagctgtagggtattggcagaccaatttttttgagcctcacttagactatttccgtcctgctgatacaacgagcccgctaggagcgaatgtcgacgggtattatccacgtcctttagaaagcgacaagaatcgtaaagcacaaagtcgctatatgcaaaatgctgcttattgtcgtttgaaaaacgtaacgttgggatatactttaccggcagatttgactaaaaaattctacgtgaataatttacgtttctttgtgtctgcagagaatttgtttactataaccaatctgtgtgatacttttgatcctgaaacaataggtgtaggcaattgggaaggatgtacttacccattgtcaaagactatttcattcggattaagtgcaaccttttaataaaataagatctatatgaaaaattatattcaatatttaactatcggagctttgctgatgggcagcctgacaagttgtaatgacttcttggatagagaaccattggataaggttactcctgaaaaattcttttctgcagaagcggatttagcagcttatgccataaataactataagtttgttactgtggatgataagtatggcattaatctttttggaaaagataatgatacagataatcaggcaagcggaacaagtaattcgttttggattcctggtgagaaaaaagttgctgccgaccgtggcgagtggaaatgggaggatattcgttcatgcaactacttttttgaccaagtattaccaagatatgaggagggggctataactggtaaccaagataatgtgaaacattacattggagaaatgtacgtgaaccgtgcatatagctattttcaactttttacaaaatttggtgatctgcctattgtcacaacggcacttcccgatattcaaggtgaattggtggaagctagcaagcgccaaccgcgtcataaggttgctcgttttattattgaagatttaaaaaaggcggaagacatgttgttgaataatcctccgggtggtaaaaatcgtatttctaaaaatgtagcttatttgcttcatgctcgtgtagctttatatgaagctacttgggaaaaatatcatcgtggtacagcttttgtaccgggaggaagcggatggccgggtaaagatgcgcaaggttatgatgctgatgtggaaattaattatttccttgatgaagcgattgctgcttcgaagtttgttgcagaccaaatggtaggcaatttagcagagaatacagatactccggaaggaatgaatgcttcattggtttctatcaatccatattataccatgttctgtgatgagaatatggaagggtataaggagattctaatgtggaaaaaatttgatgaatcattgggggtaaccagtaatttgcagatggaactttgtcgtaatggtggtggatcaggctggacacgtggtatggtcaattcattccttatgcgtaatggtttgcctgtttatgccagtggttcggggtataatcccgattgggagaaggaaggtgtagttgctacggtacagaatcgtgactctcgtcttggtatattcactaaaaagccgggagatgtgaattattatggtgatgatggtacacccagtatttgtcaaatcagtttgatattcggtgatgcgggcagtttagcaacaacaggttatattgtaaagaagggtaaacattattcaactcatatggcgaatgaccattctgccggtacctctggaggtattgttttccgtggtgcggaagctatgcttatctatatggaagcttcatacgagaagaatggaactgttgacggaacggcagatggatattggagagcgttacgtacacgtgcaaaagtagatccggattataataagacaattgccgcaactaatatgctggaagaagcaaaaggggattttgccgcttattcacatggaactatgattgatccgactttgtataatattcgtcgtgagcgccgtaatgaactttgtgctgaagctttccgatgggatgatttgaaacgctggagggcacttgatcagtttaaaacgactccttatcgcaccgaaggtatgcgttattggggtagtgtatatgaggaacaattaaaagatctttgtatagtaaatccgtcaacaggaaatatgtcttctcctgaatcaagtgtgtatatacttccatacgaaaaaatattggaaaataataccattgcaaaacaaaagggattcctctttactcctgcccattatttagagcccattggggtggctgtattccgtcagactgcatcagatcccaatgacttcacctcatcttcggtttatcaaaatccaggatggaaatatgaggctagtacaggggctgtttcggtcgaataagaatatatattgatattattttgtagggaagtctttttaggcttccctgcttttatttaaggcatttatttcttaagcgtgtattttaccttttgaaggtaggcatcgcttatctgtctgaaggtgtgatgaaacattatagtgaagagtatcatgtgaataaagaacttcatagtcgagggcatatgtgatgcggtgatctattgttatattaatgcgtaaaataaactattttcaagtgaatataaataaaataaaggtgaatgataatgtgtgatgatttaatgttttattaaataacggaggttataataaaatatttttgtttatgttcttaaatatatcaaatatattatatatttgcagcgttaatcttggtttggtttaagaataatatcttaaactggttgatttttaataaatatttaaagaatcacagctatgttaaaacgactaaaatcagtcagcatgatgctgttcctaatgggtgcctctaccggagcagcatacgcggttgccagtcccggcgttaccgatttgaaaatcacacaacagagtggaacttgtacaggtgttgtcaaagatgctacaggggaaactgttattggtgcatctgtggtagtaaaaggaactaccaatggtaccatcacagattttgatggtaatttcactttaaatgatgtaaagaatggagatgttattcagatttctttcgttggttatatcactcaagaaatgaaatggaatggaactccgctgaatgttattttgaaagatgatactcaaactttggatgaagttgttgttgtcggctatggtggttctcaaaaacgtgcagctttgactactgctattactaaaatggatgaccaggtcttaaagaaggcggcttatagtaatgtgggacagtcattacaaggatctgtatcgggattacgtgttgtcaatactacagggcagccaggtagctcacctaatataactttgcgtgggggagcaacaattacgggggataatagtgccgcattaattattgttgatggaatagtgcgtaataatatggcagatattaactcctcggatatagaatctatccaggttttgaaggatgctgcatcgaccgctatctatggtgctcgtgctaatgggggtgttatcttgattgaaacgaaaaaaggtaaagagggaaaagtagatgttaattataaattcaagatgggtatgaactttgcccgcaaaggatatgaatatctgaatgctggtgattatttgtattatactcgactaggatttaaaaatgctaaccaagcggtagcaggatatagtgatggatggaatcctgatactcagaatggttgtggtacaactaaaaataactatgatgtacgttatttggaaggcaatgaggatttggtgaatcaaggatggcagacgatgactgatccttactctggtaaacagttggtttataaagattatcatggagctatggatgatgagatttttaattcacctgcgttgatgcaagatcattatatcagtatcaatggtggaaatgataaaggaacttttgctgccagtttagggtattatgatgaggatggtcaggtcgttggaactggttatcaacgttttaatggctccttgaacggctcctataagctcttcccatttttgacaataaatgcaggaactacttattcctggtctacacagcctacattgtcatggacaggtacttatgagttcttttatcgtacacgtggtatgcgtcctacttggaatccttggaatgaggatggtagtcctaattcggctgatactaatatttccgatggtaatcccgcttatttcagagataaattactgtattctgacggaacgaataaaagcacttataatataggatttaaattggatattcttccaaagaaattagtgttaaacggtaacgcttctttgtatcgttatgattacatggtggaaaaatttaataaagcgtaccaattggagaataaagatacaaatacaacacgtgaggcttctgtggagcaggaacgttatactcaacagcaatataatgctacattgacttataccgacacttttgctgataagcataatttggaggtcatgttagggggtgaatattttacttatgatcagtttaagcttgcggcaaaaactcaaaattctcctactgatgatatccctactttaaatgtaggcgcaactcgcactgaaactagtactactaagagtgcttatcgaatactttctagttttggacgtctgaattataactatgaaatgaaatacttactttctgttgtgttccgttatgatggtatttctaaattgaaggataatagatggggatttttccctggagtttctgccggatggaatattacagaagagcagttttggaaggattccaacgtttctgatttgatttccacctttaaacctcgtcttagttatggtgtgaatggtaatgtgaacggtttaggtaattatacggtatatggtgagtatgcaacaacgaaaccttatggtggtgaaaccggtatatacaatagtgcattggttaatacagggttacgttgggaacagagccaaagctttgaagccggacttgatattggtttcttcaataatcgtttgagctttattctggattattataatcgcaagacaaaagatttgcttaccgatcttgctttaccagggtatacaggatttgataagattgctactaatttgggtactcttcgtaattctggttttgaagcggaagtacgtgctaatatcataaataaaggtggattcacttgggatatgacagcaaacctttctactgtagctaataaaattataaaattgcctgacaataaggaggttaataaccgtgtaggtggtgctcaggtatgggatcctaataaaggagagttagtatgggttggcggccgtcaggaaggtggaaagttaggtgagcttattgcctataaacaaaatcatatttttaaagattgggatgatgtaaaaaaatatgcaaacaatcgaattgataatgtcgcaaatttgtatggtccgggtaaggcagcagaatatgcaggtaaacaaggttggaaacctattgaaccaggagatgtttgttgggaggatatggatggaaatgatgtgatagattcatatgaccgttatgtcgttggtaatatatttcctaatataaccggtggattctctactacattcagctataaaaattggtcgttgtatggacgttttgattatgcattaggacatacattgtataatgatttaaaggctcgtacattgggccagtatcaaggcacatggaatattataactgatgtgaaagatatgtggacagaagataatccgaacacagatttatctaaatattattttggcgatcagaatatcaaaaagaatatcacacgttctaataatggtttaactgctgctgataacaacaattctcattattatgaaaagggggattatttgtgtttgcgagagcttacattaagttatacattaccgaaatcactaatcagtaaatgtttcatgacggatgcttctgtttatgtcacaggtcagaatttgttttatataactggttatgaaggtacatctccggaaccggctgtaagtacagaatatggtcgtggtattgataatggacgttatcctactccaagaactgtattatttggtttatctgtttcattttaatcaacaagactcattatgaaaaaaatattagcatatttaatggttggcatagcttttaccgggtgtaattctttggatttggagccaataagtagtattgccgataataaatattggcagacagaagcacaggtggatgcttttaatgtggggttacattctaagtttagagagaaatgtagttatagcatttttctttttggagaacctcgtgcggattattattttggagagtcaacatttggtagtgctacccagggtaatgaacgtatgtggaacaacagtttgaacgatgtgaatacggttgtttctaattttggaaatttatatgaggtgattaatcaggctaatctgatgataaacaaggtggaaggtatgtcgatgaatgaaagtaccaagaaatattatctgggcgaagtttatggtatccgtgctttcctttactttcagttgttacgatcttatggagatgtagtgatatggaccgatttctcggaagggtcgagcttggatcttggaaatttagcaagaccagcttcttctgctgctgacgtaatgaaattgattgttgatgatttacaggcttcagaaactgcttttggggataattatgggtttagaaatgattctcagcgttatttttggtctaaagcagctaccatgatgttgaagggtgaagtatatatgtggagaggaaaacacatgggaggtggtaacgaagattatacaacagcgaaaaatgcattgcaggaagtgagaaatcaaaccgataaatttggtttgttggaggatttctctgaagtattttcttatgataacaagaataataaagagataatatttgcgattcgcaatgcacgcgatgaatataatatgtggggggatgtaacatataataataatatgtttccacagcaaaatatattattcggatatatggatgagaatggtaatcccattagttcattgggtgataaagtgaaagtgaatggtacgatccgttacccggttaataaggatgtgtatactaaatgctttaatgataacgatacccgtaagcgaagcacacttcaggctgcttatgaaaaaaaggaagatggaactttatctctttatgggttgtatccggccaagtttttgggtacattgcttgatggggctgatacgcgtagtccattggatgattatcctgtttatcggtatgcagattgcttgttgttgttagctcaagctaaggcttttttaggagaggaccctgtggaagaaattaatgcagtacgtaaacgtgcctatggtgaagattattttaatgcacatccggaagtacaatatcccaatgataatgatgccgcactttatgcggataataagtctgtaaaaccggataatgccggtgcaatggaagctgttctaaaagaacgtatgcgtgagtttatggttgaaggaaaacgttggtatgatctgcgcttagcaggtgatgaatatgtattggaacatactacagcagaagcaacccgtttgctttggcctattgataagaatacattgactaataattcggcattgaagcagacaccaggatatgaatctagtggaggaaaataaagtattagttatataataaaagaaggtgtctgaaatggacagcctccaaaagttagacataaaacttttagagggcacttcacttttcggacaccttcttttattgaaaccgtttcaagacttttagtatatctttggggttttctatcttaatcttttctgtttcaatgaactctttgataagttgttgcttatcttttgaatacaatttcagaagtgaatggatatttcgaaagcttctcaacttgcctttaatctgagtgtaataaacattttccgttaccattttatagaccgaaaggtctaaattctgttcaccgttaacacgttggaagcgtgtattgacatcaattgcttgaacactgccatgagtaactgttcccatagctcctttcttcccgatatcttttggctttactttccagtctataaaaagagtggtatgctgatctgtcatcacttccataaaatgtccctcaaacggaataaagcggtgtatatcaatgactactgtatcaatatcttccaaattctctataaccatgtctgtcgattcattcaaaaaatgcatttccttgtttatacagtcatagttaaatttccctttggcaaactgtttgtttttcaataaaacttttcctggagtaaattccttgaagaaatagccggcaggttgttgggcatttatcaacgttatgcttcccaatgccagaattgcaataagaattccttttgtattcatagtgatggagattttaattatcatactagtcctttgagccaaattgccaaaaaacgatcgtatactatatatccttgctgctcttttaagacaaactccttattaattaaagactttaatgctacatttatgctgctggctccttttaaatcatatttctttatgaatgtggcactgttaatctcatttacaatttcctctttggctatagctttcagcaactgaatctgattggaagttaaaaactggaaataggtttgataagtatattcttcctcctgtatgatttcctggatgagtgtatgcaacagctctatggtcggagtctgctgtggcaatgaatacaatctgtttaaaagatattgcatataccacgtatgtccttttaccgattgataaatttcatggaagatattttcctgcaaagtttttttcctttcatcaaacagtttcttggcaaactcccggtaaggagtataaggaataggggccaggaaaagtttctgcgtagattggtaaaaaggtcttttgatggaaaagaagatagactccatcaaatgctttttgctgcccgaaaagataaaatgcacattcggggtgaactggatatacgatctcaataggccttccactcctttctccggatattccattatttgctggaattcgtcaatggctatataacattctactcccgattggtttaggtaggtgaaaatctctttcaaggtttcttctgaacgttccggaataaagtcgagtgttacagatggcattcctgtaatttcatcggcgccgatgaccggacggcaacttttaaagaatgagaatagcgattttaaggtactctgtgataaggtatctaatttccccaacacacttcgtcccagtagagatacaaactcctgaagattctgggttgaaaatatatccagataaaaacaggcggcagatttattttctttttgaatatagtaaaatacattctttattagtcctgtctttcccatacggcgcggactgattaatgtaatatttctgccattctttaatgctgacattaaagaagctgtttctttttcgcggtcacagaaatagtcgggcccttggtaaccggttattaaaaatggattagtagaaatactcttcattgcagtttttatgttacataaaacatgtaacgcaaataacgcaataaagtttggattgagcaaatataagagttgtatttttgttttgcccattatatcatgttctgacttgacatggttcatggcaacaatttaatatggcaattacaagatatctaaaacagaagttatgctgataatgatcatgtttcatggataagggcataaatacctggagcattatgatcctttgaaaagcatcaggaacagaaagcaggaagagggtatgacagtcggctccagctatacataccctcttcctgtaatgaggtagattccttatttcatcttatacaccaaagtcccgccctttaggatatcttcatgcgagatataattctttgtataaggttcaccgttcagtgtaatactgtcaacatacttgtgttcctttgataatccttcggcaatgatcgtgaaagtctttccatcggccaggttcaatacaaattcaggcatttgtggggcgccgaatacataattgccacttaccggatctaccggatagaaccccatagcagagaacatataccatgctgacatctgtccgcagtcatcattgccacagagtccgtcgggttcgggatgatattgcgtatcaaagatttcacggatcagttcttgggtacgttcggggcgacctgccaacgtatataaataagtaatgtgatggctgggttcattgccgtgtgcgtattgaccgatcaagccggtaacatctgcctgggtggtttccagtttcaaggtgaataaagaatccaatttgtttaagaatgcttgttctccgccgaataactcaataagccccggcacatcatgttgcacatgccaagtgtactgccatgcattaccttcggtatagtctccaccggtactttccatgtgggcaacctgactagggttgaaaggagatttccaactcccgtcagcattgcggggacgcatgaattgcgtttcagtatcgaacaggttcttataaaaatcggcacgtttggcaaaataagcggcatcttcctctttacccatacgttgggccatatcggctgcggcgtaatcatcatataccgattccagcgtagaggatactgattctgtcttaatcaagtcagtagggaaataaccgtatttcatataagtttcccaatcggatttcagtttatgagatacggtttgggtatttttgataacattgaaggcacgctcggcatcaaagcctcggaagcctttgcggtaagcttcggcgataactgaaacaccgtggttgccaatcatggtatatgtttcttttccccaaagtccccagataggcaggaagccctgtacttcagcctgttctaccaatgaattgacgaatccatctactttttcaggaaccattaaggtgtaaaacggatgggcggcacggtaagtgtcccataaggagaaagtggaataaaaagctccgttaccggctttaacgatggaatcggctgcattacggtaccatccgtctacgtccgagatttggttgggctgtatcagggcatggtagaagctggtatagaagttggtcttctcatcatccgtaccggttatttcaatgcggctcagataattattccattcgtcgtgtgctgcttgcttcactccttcaaaattccagtcggctatttccgcttccatattcttcttggctccatccacgccggtggtggacatggctactttcatcagcagttcctctcccggctccatgtcaaaagtagcgatgatacgtttccctttttctgtttcggccatgggcagatacagggtatctatgacgggacgattgaacttcataacaaaaaagtaatcctggttcacccatacgctgttgcgtacatgtccggtcaaagtttgtgcatcttcccaattggtttcgcaactttgtacttgcgaatgatattggttttcgttccacgcaggtccgtgctgaaggtcaatcaatacagatgccgagtcggcgttatgataggtataacggtgtagggcggcatggggagaggcggtcagttcggctttcacgccgggatcagtcagctctacggtgtagtatccgggagtcgctgcttccttgtctttggggaagtggctgcgataagcgtcccaggcacgggcgcgtgtgccggtaactggcatcaccaggatatctcccaaatccatacaccctgttccattaaggtgtgtttgggtaaatccccatatcagggagtcggtgtacacatattccgagcaatatctccagccgatagctccggttacggggcttgtctggatcatgctgaaaggacggcaggcaccgggaaaggtatgtccgttgtctgctgctccgatgaacgtgttaacatactgcgtgtagtcagtttcgcttgtcttctgctgtgttgtggaacagccgaagaacgagcctgccaatacaaatgcgcaaaggatagaataggttttcttcatagattcgcaattaataaatattttgtgtaaagataaagagttttctggaaaaatgggtcaagaaatcaaaacaagaaacgaattaataagaagtaaatgaatatcttggtacatcttaaattaataaacgacatgaaaaaccttagttttggatctctcatgaggatactctctgcatcattcattttcttttcatcaaatcttctttagattaatccgaaatgtttcaaagcattggctatcccgtcttcatctacggaggttgtcacgtagtcggccacagctttgacatggggctcggcatttcccatagctatccctgtggttacgtgtttcagcatggggatatcgttgccgccgtcaccgaaagccattgtgtctttcaggtcaatgtcaaaatatgccagcactttgtctattcccgtacttttactgttgccccgtgcaatgatatcggcaaacaatggataccagcgcatcggttcgcaatgagtcagcactttgccgaatatatctgtttctttttcctcttcggccgtaaagtatcccattatttgcaggatatcttttccacgggcttcttctatggaggcgacagggggaacaggaatttcaatcagatcggaaacagcctgtactctgtcattcacttcagtgacgaacatttcattgccgtgtacaaaaacgaaaggtaccggatatttctgttgaaaagttattagccgttcaatgtcttcttgcgggatgcaacctttataaatgggctggtggccggcagtaaaacaatagctgccgttgactgtgatatacccgtcaaactctaaatcactcagattgtttattaaacattgtgggcgtccggtggcaataaatattttaatgcctttatcacgaagtgcttttaatgcttcttgggttgaagcgggaattttatgagtttcaaaagaaaccaatgtaccgtcaatatcgaaaaaaatagctttaaccatacgtttgcctattgaatattatcgttatatattttcattttgcaaagatgagaattaaaatacatgcacacaaatacgataaaggttaatttttggcttatttgactttacagattgattttaatatctatatttgtgtttctaaaataacaagagaaatggcagttcagtttacaagaatagcagtaaagataggtagtaatgtgttggcgcgtaaagacggtacactggatgtgacgcgtatgtcggcattggtagaccaagtggcggaattgcgcaaagccggagtggaagtcattctgatttcatctggggcggtagcttcgggacgcagcgagatcaaaccttccaaaaaattagatagtgtggagcaaaggcaacttttctcggcggtggggcaggcaaagctgatcaaccgttactatgagctgtttcgtgaacacggtattcccgtcgggcaggtgctgactacgaaagaaagttttggcacgcgccgtcattacctgaaccagcgcaactgtatgatggtgatgctggagaacggtgtcatacctatcgtaaatgagaatgatactatttcggtcaccgaactgatgtttacagacaatgacgaactttcgggaatgatcgcttctatgatggatatgcaggcattaatcatactgagcaatattgacggcatatacaatggctctccttctaccctcggtacgcaggtgatacgggaggtggagcagggaaaggatctttcggactatatacagacggagaaatcgggctttggccggggcggtatgctgacaaagactaccattgcccgcaaagtggccgatgagggtatcacagtcattatagccaatggcaagaaagacaatattctggtcgatttactgcaacatccggcagggacagtctgtacgcgctttattccggcagaaggcggagtatccagcgtgaagaagtggattgcccacagcgaaggctttgcgaaaggcgagttgcatttgaacgaacaggccgtgaaagtgttgaaaggacataaggcggtaagcctgcttcctgtgggagtggtccgcatagaaggggaatttgaaaaagatgatatagtgaaaatcatagaccaccggggcaggcagataggagtgggacgcatcggatttgattcggcagaagcacgtgcattgcaggggaaacatgggcagaaacctatggtacactatgattatttgtatttggactgatgcggtgtggtaatgatttagataaaatgaagtgactatggaacagataaaagatatttttaaacaggtgcggcaggcaaaaggatctcttgctttctgcaaggaggagatcatcaatgacactttgtatgcattggccgacagggtggaggctgctacggatcggattctggaagagaacgccaaagatttggcggcgatggatcccttaaatcccaaatatgaccgtttgaaactgacggcggaacgtattcgcgctatagctggaggcatacggcaagtagccacgttgccttctccgtcggggagaatactgaatgagactgtgcgtcccaatggcatgaagctgaccaaggtaagtgtgccttttggggtgataggcattatttatgaagctcgtcctaatgtgactttggatgtgtttgcactttgtttcaagtcaggcaacgcttgtatattaaaagggggaagcgatgccgatttctccaaccgtattctggtggagattatccggaatacattgctggatgtagcccacttgtctccttatctggtggcattgttgccggcaggacatgactcggctgatgcactgctccatgcccgtggctatgtggatttgattattccccggggcggcaaggggctgatagattatgtgcggcagaacgccacgattcccgttatcgagacaggagctggtgtgtgtcatgtttattttgacaaggatggtgatgtggcgaagggagccgccattatccgtaatgccaagacacgtcgtgtcagcgtgtgcaacgcattggactgcctgattgtagatgtgaaccggctgaccgacctttccactctttgtagcgatttgcagcaggacaacgtggaaatctatgccgatgacttgtgttataattatctgaaaacttcttacccttcccacttgctgaaacatgcttctacggatactttcggaacagagtttctggactacaaaatggcagtgacggcgactatgaccatacaggcggctgtggcccacatttctatttatggttcgggacatagtgaatgtattgtgacggagaatgaccgggcggccgattattttatgaagatggtggatgcggcttgtgtttatgtgaatgtgcctacttcgtttaccgatggaggtgagttcggattgggagcggaaataggtatcagcacgcagaagcttcacgcccgtggtccgatgggcctggaggaactgaacacatacaagtggattattcagggggatggacaaataagacaataataatataaatgaaaggattatgagatactttacaaacgtacatgatttgggcgacttgaagagtgcccttgccgaagctttcgaaatcaagaaagaccgctacaaatatgaaaccctgggaaagcataagacttgtctgttgattttcttcaacaacagtctgcgtacccgtttgagtacccagaaggcagctcgtaacttggggatggatgtgattgtactcgatgtgaatcaaggtgcatggaagctggaaacagagcgcggtgtcattatggatggcgataagagtgaacatttgctggaggctattccggtgatggcttcttattgtgatatcatcggtgtgcgttcgttcgctcattttgagaaccgcgaggatgattatactgaaaagattctgaatcagttcataaaatattccggcaagcctgtattctccatggaagccgctaccggtcatccgttgcaggctttcgccgacctgattactattgaagaatataaaaagaaagaccgtcccaaggtggtattgacttgggcgccgcatccgcgtgcattacctcaggctgtacctaactcgtttgccgactggatgaacgaggccgatgtggattttgtcatcactcatcccgaaggctatgagctagacccgaagtttgtccgtggcgcgaaggtggaatataaccagatgaaagcttttgaaggggctgactttatttatgccaagaactgggcatgtcccggtgtcacccatcctgccgactatggaaagatcctgagcaaggatatgagttggacggtagatgcggcgcacatggcagtgacaaacaatgctttctttatgcattgtctgccggtgagaagaaacatgattgtgaccgatgaggtgattgaagctcctacttcgttggttattcctgaagcggccaaccgggaaatttctgctacagttgttttaaagagaatgctggaagggttggaataaccggcagtcggaatgacgtatgcttccttttttatttatcgtttcacctgtgtgatgaaacagtatcacccatgtgatgaaaattgatcaccttagtgataaaacttcatcactaaggtgaaacgataagcctaaaaaggacagcatagtgatttctatcggacgaaaaactgtgtgtatccttggcttgattataagacagtgcgtggcaagattgccattcaagaggaaaaggtatcgcttcggaaatagaagaccggacggggactctggaacaaacttacagagatgaagaatttatgaaggattgaaaaaaaatccttcataataagtgacagtaaatcaacttgctaaaccataatgaagaatttgaaggaaaaaacggttaaaaacttatttccttccctaattccttccagtctaggatacccttatccagattatacactttgaatcctttttttaccaaaatattggccgcattgcggctgcgccttccacttttgcaataaacggctacgggacggtctttttgaagaagcttctcgatgtttgtaccaaactcattgtccaatacattgatattgatgctgcccggtatatggccttcggaatattcggctaccgtgcgtacatcaatcagttggatggtcttgtcctgtatcatttcctcaaactggtcagaggaaagattcttgaatttgtcactgtctttgccggtacatgcccataatcctagtgagaatgcgcagatgaagaatatgaaataaatggtctttatcataaaatggaatgttttgatgtttttgtttgctaaaaataaaagatacgactggtcataccttctttataagtatggatgttgaatacaatcttatcgcctttatgcagcttgccggcgtatgcccataagggaacagacagatagactttacggttgaaaccttcgatgtcattattcctgtcatgatagagtgtcaagtataatgtttgttctccatctttgttctccagtttgttctcaataaagtgatagccgtgcttctgatctttgactttgacttgtaaaatcaggttcaggtaattcccaccccgccagatgctttgaatggccaccggatcggtctttatctccttgaatttagattcgggcaagggaacaggagaaataaccagttgggtattgtaaagtatggcttctttttctgcttcttccgagtctgtcaatggagcgtacatggtaaccgtgcggtacgtggtgtctggtgccagtccgtcaagaccggtacgtgactggatgcgccactctgtcccttcgtccgttatcagatatcgtccggttcctgtatgatcggttttcaagtcgatcatatctgtcagaacattgggatatacataatcgtcttcaccgcacgcgccgagaagcaaagaagctagaaaagataaaataacgactttcctcatgtttgtaattttctttttcagggtggactgtaaaatccaccctttacggtaaacgttcttatccttttgccgctttcaggtaattgatgagcggattggcatacatagtcagcaaagcatggcgcaggaaagaggcatctttattgtgaaggtctactttggcaatctgttgttccatgtagttttcaaaatgttctttttcttcttctgtgtactcggccgtgaaacggttgtctcccatcaagaggtcacacgccacataattacctgcaaacaagcggtaactgctgtgtatatgccggtctatggtttccgatatggcggtaaacaaatcacatttaggcaaattgtgttctttcagttcgtccagttcatgattcagacaggcggaagtctggaaatggatgcgtcctttgtatccgtaaaggccggtctgcatattgatcaggtcgtcttcgggacttttctggaaatagggatcatcccgtttctgttgtaattccttggctttcaggaaatcgcatgggtcatattcataagagatagcgagcggaacgatgttcagttctttcagtctttcggtgacatcgccttcacctgccatggccatcattttcaatacactgtcttgggtacggtcattggaatctttggcacgtccctgacgttgcgctatccataaattctcatgtttttccttcatggcgaaatgcatgtagcgcgacatcaaagcagatgcttccagtttctgccgcatgttgaggccgcgtttcacgatgaatgatttattgacacgtaccagcttatgaatccatgggtagatgagcaggttgtcgccgatggcgatttctacggtggtcattcctttgtctatcagtaggatagatagaaaagccgaatccagaataatgtcacgatgattggagatgaaagtgtagttccgggttaagtcggacaaggcggaacagtcgaatgtcagtccgttggctgtttttttcaccaaatcccataacagtccgtaaaagaacgctttttggaattccaggtttgttttgcattgacgcatcttcatggcaagaccttcgaaaggtacgcccggcataacagactctaccactgtccggaaaacggggtcagcgattaattcttcatagatttgcggtaactcttcgggagtgtacggacgaatctcgttaaattcagctggtatgttcataatttataagggttagtcagtgatgagtggccagtggttagtggttaataggctgcattatgtgccgcatggatattaatcactaaccgctaatcacgaaccactaaaatttattttctataatgtcagtcatcacatcttttatatccaatcctgcggcacgcacctgttggggaatgaagctggtagctgtcatgcccggggtggtattgatttcgagcaagtttactttttcgccttcggtaatgatatagtcaatgcggataaggccggaacaccccagaatgtcataaatggccgaagtgagcagacgtacacgttcggctgtatcttcgggcaggcgggcaggggtgatttcctgtgattctccattgtatttggctccatagtcaaagaattcgttggcactcaccacctcggtgatggggaataccacttccttgtccgaggtcttgtaacagccgcaggtgatttccgttcctctcataaaggcttcaatcattacttcgtcactttcctcgaaagctttttcgatggcgggttgtatatcttccttagtctttactttggtgacaccgaagctggaaccgccggcgttgggtttgatgaaacaaggcagaccaattttgttgattacttcttcgtctgtaatttcaaaccctttacgcaggatcagtgattcggctacgcggataccgaagcctttcaggtattggttgcaggtgaatttattgaaagtcatggcagataccagtacgttacaactggagtagggaattcctaacaggtcgaagtaaccttgcaggataccgttttctcccggagttccgtggatggtgatgtaggcgaagtcgaaatgtttcttttcgccgttctccatgaaactgaaatcattacggtctatcggggttttggaaccgtccggaaggactacttcccaccgatgcccttccatctctactatatataggttataacgctctttgtcaatgaaagagtaaagtccctgtgcactgcgcagggaaacgacaagttcgctggaatctcctccggctactatggcaatagtacgtttcatagttcttctctgttactgatatagtttctccacttgtctatcaggtttgtcatatcctcgggcagcggagaggtgaagaacatctcttcgcctgtacggggatggacaaagcccagcgtcatggcgtgtaatgcctggcgggggcaggtctcgaaacagttgtttacgaattgtttgtatttactaaaatgagttccttttaaaatttcgtttccgccataacgctcatcattgaacagcgtgtgcccgatgtgcttcatgtggacacgtatctggtgggtgcgtcccgtttcaagcacacactctaccagcgtgacatagcccagacgttccagtatccggtagtgggtgacggcgtgctttccttgggcggggtcactcagtacagccatttgcatgcggtctttggggttgcgccctatattcccttctatggttccttcattattttctacgataccccataccagagcattgtatttacgtttggtggtcttgttgtagaactgaagtcccagatgagtcttggcatcgggggtcttggctaccacgagcaggcccgaggtgtctttgtctatacggtggactaatcccacttgcggatcgttagggtcgtatctggggttgtctttcagatgccatgctatggcgttgaccagcgtaccgtggtagtttccgcatcccggatgcactaccagtccggccggtttgttgattaccatcaaatcgttgtcctcatagactatatccagtggaatatcttcgggaatgatatcattatcataacgtggacggtccatcatcaccgtcagcacgtcgcaaggctttactttataactgcttttcaccggtttgccgttcgccatgatgaggccggcgtcggcagccttctgaatacggttgcgcgaagagttgacaagccgttcgaacaaatatttgtccacgcgcacttgtgactgtcctttgtctactactacacggaaatgttcatacagttcggcggggttgtccactaccggttccacatcatccagtgtgtcgtctagttcatccacatattcttctctcatcatcactgtgtgttaagtttaaaaccaggattcgtctaccacaggtttgtcatcgttcgcagttccggattcatttaccaatgcagaatcttcgggcatggtttcattgccgttgcctaccgtgagggtcagtacggcttcgtgaggaatcttttctccggctttcaagtcgcgtcctcggtattttatgctgtatacccagtctttttcgccactgatatattcgggttcggttattttaaaacctaacgcacgtaatttagcttcggcttggcggagagaactattatccatgatatcgggaatggctaccttgggggcgctgtctgcattgacggtcagatagacggttctgcccgacttcaccttggagccaccggcgggattctgttccaaaatagcaccgggggctattccttttacatagctggagtctatgacgattgattttagtgactgcttgtcgagttcattttctgcaatccgcagattcattccttttacatcgggcactaccactgcttcgccgtggcgtgtatagttgtccagccattgaagggttcccaaaggtgctgccacaatgaccactaccatcgctatcagattgagccagaagaagcggttattcttgaatgaaaagaattctttgaatgttaccatatctaacttaattatttcgggtcaaagatacgacaatttcatttctgttcctacatttagttatgaatatcatatactttttgtacctttgcatcccgaaaaaacaacctgtttcctgtcagagtaaataaaattgaggtaaaaagaagatgaacgagacaacaaatgaacaagaggtgctgttattgcgccgtaaactagaccttttattacgtaccggcaagctgctgatggagagcgcggcagacactaaccgaattgaaagaaacatgaagcgcgtggccgcttatctgggtattccggaagagaaactgcatattgatatccggtggacgatgctgatggtcaatgtgagtgacgagaagcactctttttccaagtttcagaaatgcgagaaacatggtatcaatatggaagccatttcaaaaatcagtaaactttcgtggcgtgccattgagcaggattattcattggataaatacgaggaagaacttgagaagattgctcgtcaggagcgtaattataccccttatgtcgtggcaatctgtaccgggtttgcttgtggagggttctgcaagttgtttggtggtgactggattgcttttctgattacggctatttgtacttttgtggggttccgtactcgtgcccgttgcattgagttcggtatcaatgtatatatgagtattgcgatctctgcatttttatgtacttgtctggcttatgcgttttctttttccggtttatcttccactccgtatcatccgttgctggcctgtactttatatatagtacccggtgtgccgctgataaattttgtggacgatatgattgacaatcacttgttggtaggtattacgcgtgcagccaacacggtaatgatggtaggaggcatggcgtttggtatcgcttttgccttgaggctgctggtgatgaatgatgtgactatcgaccagaagttcagtgaactgagtatggtgccgcacgatgcttattgggtatatgctgttgcggctgcaattgcggctatgggattcgctactatttttaatgtgcagagacgtttgttgtgggtggtggctgtaggtggaattattgcagtatgcacccgtaactttgtaaactttgaattaggatatggtccggtgatcggttcgtttatgggaagctttgtcgtgagtttgatagctgtcaaagccgttcattggtttcatgtccctaatcatgtgctgactattccttctgtcattccgatggtacctggtgtcttgatgtatcgttcgttgctggcgcttatcaatatgcgtggagtggtaggggaagtgacacttgctttttccaatggtattaactcggcgcttattattttctgtatagctttgggggtagctgttcctaatatttttgcccggcgttacattgctaaggaccgtcagcgtttccttacacagatgttggcagaacgcagagctcgtggtaaatttattgagtggtagcaggtgtatgtttacgaagtagtattcattaaaacttgatagacaaagaaaaaggattttccattgcggaaaatcctttttctttgtctatcaagtttatgctattaataccgcagtagaaaacggaatgaattttatcgatgtctctccttactacgggcattataaggcagaaaccgtattgggaaaagcattgaaagagatgcctcgtgacaaatattatctctctatcaaagtaggacgctacggcaaagatggagtgaacacttggaattactccggcaagcgtgccacagaaagcatgtatgaaagcatggaaagactgcacatagactatatagacttgataaatgtgcacgatgtggaatttttggatatgaattaggtggtgaatgaaacactgccggcactcgtcgaactgaagaaagaaggagtagtgaaacatgtagacatcatcgacttacagctggaaaacctaaaataggttatcgaccactctgaaccgggaattatagaaagtgtattgaatttctgccactactgcctgaacgatgagaagttgagtgattacttggattatttcgaatcaagaaatatcggtattatcaatgcgtctctgctttcaatggggcttctttcacagtggggtgccctggcttggtatccagctcccaaagcattggtcgaggcttgtcaaaagtcagtgcaacactgttcatccaagaattatccgatagaaaagctggctatttagtatgctgtccgcaatccacgtattgctactaccctgttcagctcagccaatccggcaaacgtattgaaaaatatagcttatgccgaaaagcccattgactgggatctggtaaaagaggtacaggaaatcatcggtgaccagatgtgtgtaagctgggctaattcttaaacaggggaggcaaagagtatggacttcaagattatagatgcccacttccatctttggttccggcaggatacggaagtggatggcatgcctattcgtacattattcaacgggcgttccctctttatggggagaagaacggcagatggttccgtctttatgatcgacggacgaaacagagcggaagttttctgtcaaatatggattatgcacaagtttcggcagctgttgttacacaagagtttatcgatggtattcagaacgggtacttggctgaggtggcacgaaaatatcccgaccgctttttcgtatgcagcatgtgcgagtacatcgtcttgtcatggaataaaattattccggcaaaccatacaaatcaagtactttctacaaaaggaattagatatccgcggttcatgcaatgccttgcctgccgacttcagagcagtaatctgctatatgaaacaaggtacttgcccgaaagatgagtttatcagcaaggtcgccactcccgaaacggcattgtaaaccatggaggaatgggctgctgctcccagcaaattattccgcatactggtagagtttgactgatgacaatacatattggataatacccggatatagtatttatgtgggctattgtccaaagaatattattttaaagctacatctcacattctactcgattgaataatatcaatcaaaatcggcttgagttcgctgacaaaacacttcacagctatcaccatcaagataagccccatcaagcgcatcatcacattatttaccgtcttgcctaaaatggagactaaacgggtggaatttctcaatataagataagtgataaaataaatcaatgcaatcattcctatcaatatcccttttatagtccatgtattggtatcgttcatcaacgtaattccattggcaatggaacccggtccgcaaagcatgggaatggaaagcggagtgatggaatgtcattggcgtatgttttgatttctttgtttttcagtttcgtattggtaaaacgtgcctgcaacatatcataaccaatctttagaataatgaaactggcagcaattcggaaattattggtagatatactgaaaaatttaaataagaattgacctgagaaagtaaaagccaaaagagtgatgaaagagatgttgcccgtttcacgatatggcatcgttcgtcatctcccatccctttagtcatagtcaaaaacacaggcattgttcccaggaaattggttaaggtgaaaaaagaggtaaagcatagttatgcaaaaggtaatagtgtgtctattaaagtatgattttttaggttatggataaaagtactttattattgggaaatggacaataaagtcctccaatattttactttcatcaaaaataaaaccatgcaaaccactacaacagatagtaagctattaaactttctactaattttccttcattatttgcctgagaataatacgtgaaaagaaaggaaatcacgtattagttgtaaatgaaataaccaatttacaaaaaaatgaagagaaacattttaatttgctttttattcttatttgcgacggccctgcaaagttcttcgctaaaagaatattctattgagaaactggaaaagatattagtaaaagagtttcatccttatcctacttatggggatgatatatggtttaagattccagacagcatacgcttggtttacataaaccaggcagaaatgagaatacatgataattgggaaagtttaccagccagtctatttatggaatataagcagaccggagaccggaacagatatcaaaatgtatactttaaaaagcgtagccaactcactacgcttgccatgggagaattattggaaggaaaaggacgttttatccttcctctaatcaatggcatattatctacttgcgaagaaacttggtggggactacctgcacattatggcacttgccttccccaaccggaagatcagaccgttgcattatttgccgcccaaacagcaggagatttagccttgattcaagatgtattccgacatgtatttgattctatatctcccctattaaaccaacgcataacgcatgaattaaaaagaagaatactggaaccttgccggacaaggacattcaaatggatgaccgaagataacaattggaatccatggattacttcacattggattacagtggctttaatagccgaaaaagatatatcgaaaagagcagaagatatttcattagcactgaaagcaatggactactattattctcattatagaaatgatggcggatgtgatgaaggtcccggttattgggctagttcatgcggttgcttttttaactgcaattacttattatataaagcgacagatgggaaaattgatttaagaaatgaagaaaagtttcataggatgggagaattcatctgtaaagtctacatgggacgtaataaccgatttgtcaattttgcagatgcttcaccccgtacaaatctaaatccgggaatggtatacgaatatggcaaattcattggcaataatacaatgatgggtttcggtgcactcaaagcaaaagaatctatagccaagaaggagatgatcagcaatggaaaaggggcttcaataaacggattcttatatactctattatctaccaatgaaattatagaacacccagcaatcgagcctttcacccgcgactgttttttccctgatttacaagttttcataacccgctcttctcctcaaagtgacaaaggattatcttatgcaattaaaggagggcataatgacgaaagccacaaccataatgatgtaggaaattatatagtgtatgcagacggagaaccgctaataattgatgtgggagctttggcttataatgcaaagtacttttccaaagaccgttatactttctgggccgtgagttccgattatcataatactcctattataaacggattcatccaaaaagagggaataaaatatgctgctacatccgttagcgcccaaggcacaaagaataaaggaacttttacacttgacctagccggagcatatcctgtcgaggccgccgtcatatcatggacaagaaaattgagtttatatcgacaaagaaacattttatatttctcagaaacctatatactaaaagaatacaaagctccttcatctataatattaatgacagcggccttggtagaaaagaaagaagacggaatcttatcattgagattaaataataaaaactactcactcaaattcaatcccaatcaactgtctgctatgatagaggaggtagaacacaatgatgcttccataaaaaatatgtggggcaaagtatatcggataaaattgcaaatcaattcccaagaattgcataatagagtgacttattccttatccgaaatacctaataacaaaatatgataactctgtcccaaatgtaacaaatagctgtctgatatagcttttaagcctttcatgaggttatttgttacattcggaacatatatctgttacttctcttcgctcttctttattcatccttaaatagctttgcaaaacaagaaagatataatcataaactatttagtactatgaacaaagaaacaataatccttcatgcatttattacaaaatgctacacagagtatggcagttttataaaaaactacatcagctatcgaattccacataaatacgaagctgaagatttaacccaagaagtatttattcgcttattggactataagcaatttatcaatcctgaaacgataaaaccgtttctactgacgatcgcgcgaaacctaattacagacaatatacgattatattataaaatcgaaaattacacatcgaagatatatgaaacgataaaatcaggtatagagaatacggaacaaaccattttagcaaacgaattggcagcattgattaactccagaatgaaacaccttccggataaacgtagaacgacctaccacttaagcctttacgatgggctatctgtaagtgaaatagccgaaagactacatatttcatatcgtacggcagaatgtcatctttttctagcccgcaaggatatgcgtcactttataacctatttttgggcatgttaaaaagacgggaagtaattcattatataaaattctcactataaaaatagtacataacctcctaataaacgtcatagatacgctttgagaagcattaaacagaaaaaacaatattctcgctacgtgaaaagaaaggagcttccgtatctaacataggaatgtttcatttaagggacatcgaaggcaaaaacacttaaaatctctttttattaattttaaatttatacgtatgaaaaagaatcaattagattggctctcatgggagtggttgattaaagtgatgtttctattatttttttccataggaaccacacataccacttgggcacagtctcagctaaaaatcacagggaatgttgtcgacacacaaggagaacctattattggtgcaagtgtcgtggtcaaaggtacctctaatggtactattactgattttgaaggaaattttcaactcaacacagaaaagaaaggttctcttgtaatttcctatatcggttacgtcactaaagaagtaacaataaaaccgactcttaagattgtactagccgaagataccaaggctttggatgaagtagttgtagtaggttatggaactcaaaaaaagagtgatctaacaggttctgtcacttcggttaaagcagcagaaataacggctgtcacctcaaataatccactagaatcattgcaaggacgtgcacctggagtagcagtatttactaacaatgctccaggagaatcacccatattacgaattcgtggagcaggctccatacaatcaggaaatgatccattatatgtagttgatggattcccacttatgaacggcagtttgaatgatattaatcctgctgatattgcttccatggaaattttaaaggatgcttcttctactgccatctatggatctaggggggcaaatggagtcgttttaattacaactaaatccgggtctacaggtcgcaagaatctatctgtcaacgcttcttttggaatacagagcgcagcacggctggtagatttattagaaacgaaccaatttattccgtatattaatgaggcctatgagaatagaggaggacaagctccttttaaacattatactcctactgcaaatacggattggcaacgggaggctatagaaaaaagtgctattgtacaaaactatacagtatcattggacggaggatcagaaaatacgaattatatgatgtcattagggtattattctcaagacgggctagtaaagaacgtaggatatgacaaactgacgttgcatagtaacctaaatcataactttactgattggctaactataggcagtcatatccaaatggcttattcagaaaaagatggaaataacgatgtcatgacaggcctttttcaaagaggatggcctactatgcctgtttacaatgaagatggctcctattatgtatcttctctggaccctatacatagttcctatattgaaggaaatttcaaccctattgcagatataaatggcactacagctaccaactccagttttcgtgcattgggtgatatttatgctgagttccaactcctgaaaaacctaaaattcaagacaacgtggggagctgatattaacaatattagaaaatactcatatacctcttctcaaacagctaccaatatcgctactaatggtacaggagccggaaacaatgcttaccacagaaacatcaccaaactaacagaaaatatgctcacttataataatacatggggaaatcaccggttttctgctacaggagtttattcatggcaagaatatacctatgaagatatgtctatgtcggctacagggtttgagaatgatgctaccggagcatgggatatgacattaggagacagaaattcactgaactatgagtctactaaatacagcaataaactaatctccttgacggcacgtttcacctatgcttataaagacaagtatttgcttacagccaccggacgttatgacggctcctcccgttttggtgaaaacaataaatatggattcttcccatctgcgggtatagcatggagagtggaacaagaaccgttcatgcaaaaaataagaatgataactaattttaaacttcgtgccagttacggtgttacaggtaaccaggaaatcggaaattaccaatccctagctctattatcgaagaacaactatatttatgataataacattttgatgggcttcaaagaaggcatcggaaattctgatttgaaatgggaacgtactcaccaaatagatctaggctttgatttatctttatgggatcggctgaatattacctttgattattatactcgtcgtactactgatatgctttacaatgtacctattccaactacatccggtttttccagtattttgagtaatgtaggtgaagtcaagaataacggttatgaattcacaattggcggacgtgtcattgaccgtaatttcaaattggacatctctttgaacggttcacacaataacaatgaaatcacagaactttatggggatgtgacaaggattgatggaagcaccaatgcagagtcggggttgacacacaatctcgttgtaggacaaccggtgaatggagtttggggaagaaaatcgcttggcatcatccgcactcaagaacaattaaacgaatataccagccgaattaaaagcgaacaatctcaattaggttctgaaatgtatgcagatttaaatatggacggtactatcaatactcaagactatatttgttatggatctacagaacctaaattcttctatggaatttccattaatatgaaatataaaggtttcggattggatatatatgggcaaggggcttgtgactatgcttcaggaacaggcggagatgcaggtgtttttacaacaggtgcaggagcttacggttattccaatgtttctaattttgtactgtgggccgataataacgtaggcaattcaaaatatttgattccctctaaagatgcttacaaagaaatgtggagtgaatcaaatccaaatggtacccgcccacgcataggtgcaaaaaatgcctacttatccgaccgtactaatgccaattggagttatttcttaattaaaaacatacaattaagttatgaatttaagactcgccatatacagtccatgcaagtatatgttaatgcacaaaactatataagctttgccaaccattccggttataatcctataaatggagatgttagtcacccatgggctaaaattataaccttaggtatcaacgctaaattctaacaataaaattcagcaatatgaaaaatgcgaacaaaccttggaacaatatgaaacattatatcatcatgtttctaacaatacctgtactatacagttgttttgatttagatgaagttccttacacatcattatctcctaacaatttctacaaagacagtaaagaacttgaaatgggagtgagaagtacatatcgcggattgcgagacatgttgggcgacagatattatggatgcttggaagtagccacagaatttggatcacccactaataccaaatgggaatatcccaaaaccaatttttggatagatattaataatccagacataagctatgggccgggatgctggagcaaaggtttcaacgtaatcaattgtgctaacattgtccttgcacgtggtgaaggtatagatatgaatcaagaagaaaaagaacaaaaatatggagaagtacgattccttcgcgcatatgctaattatattttagttcgtctttacggtgccttacctatacccgaaaattataccaacgggttggatggattgaaaatacctcgaaagacgatagaagaaaactatactcaaatcatagaagatctgatctatgctattgaaaaacttccattgaaatctcaatatggaaaagatgaaatatggaaaatatcgaaaggtgctgctcaagcattattaggcgatgtttatctgacaagaggatgcatggaaaataataaagaatttttctctttagctgaaaaacagttagaagcagttattaattcgggagaatatcatttggaaccgaattatgaagatttatggttctggtttaatacggcaaataagaatggtcaagagtctatttttgaattacaattcggagaaactcagggaaatattgtaacacaatacaccggatgctacaatggcaggattccttctttaggtagtacacattatttgcgtgtcggtccttccatagaagcctatctttcataccatccgaatgatgtgcgacgcaattgtatgctcaccgaatttgaagatgtatcaggcaacattgtccaatttgatgtagcagataaaggcttctatccaggtataaaaggatggaccagtgccagtcccggaaacgtgaaattgtatgatcgtacagaatcggcttacttaaatgactgctctaaagcaaatctctatatgattcgatacgcagatgtgttattagattatgcagaagctgtcaatctccaaaggggtcctacagcagaagctgtttccaaattcaatgaagtaagaggaagagccggtctgaattctctgattccggctaatgccaatgaattttctgatttaatctaccaggaacggggatgggaatttataggagaaggtctcttatactacgatgcactacgcacagatcgaatcggcgaaaaggtttataaccatttaaaaaatgggataacagatgggttgtatcaatacaaaggacaatccatccaattcattcccaagaagacattcttatggaaaataccaacagctgatatgaattcaaatcctgctttggaacaaaatccagataacgaatcagatcctcattttcctattggctaaattaggatgaaaaccgaaccacattgatcattcttttaaattagattatataaggatgttttcaataggtttttaaggtatactctcccgtctgtgacagataggagagtttttagacatttatatacaaaagtcttatctttgcttaatattgaaagaatcattttaataagatatttatgagtaatacggagaaaacaatggtgattttatggattgcaatttcattcatattgtcggcatcaggccaaactaattatatatttcgcaatatcaatatccagcacggccttcctgacaatcagataaaaggactttttttatctccggatggaagaataggaataagaactgctgccttacttgcttttgataatggtggtagtttttcctctcattcttatcacatacatcaagccaagtatgactggaactatgacaatattcaccaagaatatgttgattctcataattatatctggatgaaagaacgaaattatcttcgcatttttgatttaacccaagagcgtttcatcaataatatagattctcttttacaaaagatgggcataaccgaggaattacaagatttatttattgactctgaaaaacgttattggttcatattaaacaaaggaaaaatatgttgtattgataacaataggaagaatttacaatatgtagataataatggcatttttatcgaaaaatacggagaaatatgtgatatagacggtcgaggagattcttgctggatagtacacaaatcaggaatcgtacgctgttggaatagccagacaaataaatttatccgccaagaagagcaatttgctaatcagttcagatcgggtgaacgcgttatgctaaaggttcttccgaatggagatttttggttaaaatggcaagacggggtcgcctgctataacataagaaaacaacaatggcacgaaattaaaggattgaatataaaacaaacggatctactcacaagtttagccatagataatgaaggtaatgcttggatcggatcttctaaatcaggattatatatcatagataaatttagttatgaagtcgagcatatccactatcttccgttagtgggagaaggctacatagataatgacatacttgatatcattataaatcctcaaaacaatagcgtgtggttaggactattaaaccaaggaatttgttattatcatcccagcctcggaaagttttcattaatcaataacacaaatgttaaagggaagtgggaagatcaaaacgttagaagtatggtagaatatgataatgggaatattttattaggtacaaattccggactgtattgctataatccaaaaacatcagaaataaatcttctctttaccgaattggcagataaaatatgccgtaaaatgttgcgagatagcaagggaagaatatggattggtacttttcatcatggcttatattgtattgagaatggaagattgttcaaatgcaacttaaaaattaaacatcagaaaagtacatcgacaagactgataagatgtttgtttgaggatagtaaaggaaatatttggattggtatatacggaggtttgtgttcattcaatcctataaaccataacatggagttcgtaagtgataaacatatcaaaatcaagaaatttacgagtccctccgttgtcacagaagataaagagggacggttaatcgttggagatgacaatggtctttattattactatcctgataaagaaaaagtatgggtgcccgaaatagatgccccacatgatgaacggtttcatcatactaacaacaaatataattgtatttattgtgatagtcggggaatgacatggtttggtacacataatggactaaacattctggaagttgaaaataacacgcttagaaaaatgaaagcgcactcttatggaatatccaataacattatcatgtgtatttttgaagatcaaaatcacgatatttggctttcaacgaccaatggtctgaataaaatagtggtgaagaaagaaaaaggggagtaccactattctataaattcttttaattcaaatgatggactgatgaaaggggaatattatccttcaagtggatttaaagcatgggatggaactctatactttgggggaatcaatggcttcagcacctttctgcccgaaaatataatatatccttaattccgcaacactattacaaatataactttttaagtacctgagcaacaaaaagttgctcaggaatttgccatgtcagatttttcacctatcttagtgttgcaaatcaaaatatgtatcaaacccgacagacatggcaaaggtagcaattaaatccgagaaactcactccttttggaggaatattttcaataatggagcaatttgactccagactctcatctgtaatcgactcaaccctcggtatgagatgcaggctgtatggttatcaatacagcgaaatcatccgttcgcttatgagcgtttatttttgtggcggctcatgcatcgaggatgtcaccactcatctgatgtaccacctttcgcttcatccgacacttcgcacatgcagtgccgacacgattcttagagccataaaggaactgacccaggataacatttcctacacatccgacactggcaagacctacgacttcaacacggcagacaagctgaatacactgctcctcaattgcctattgtccacagggcagctgaaagagggcgaggggtatgacgttgacttcgaccaccagttcatagaggctgagaagtttgatgcgaagcctacatacaagaagttccttggttatcgccctggcgtggcggttattggcaacttgattgtcggcattgagaacagcgacggcaacacaaatgtccgtttccaccagaaggacacgctgaagaggttctttgaaaggtttgaacaaaacaagcttattatcaaccgtttcagagctgattgcggctcgtgttctgaagagatagtggaagagattgctaaacactgcaagaccttctatatccgtgctaaccgatgcagttcgctctacaatgacatctttgccctcagaggttggaagaaagtggaattgggcggcattgagtttgagctggcctccattctcatcgagaaatggaaagggaaggcataccgtcttgtgattcaaagacagaagcggatagacggcgaactcgacctgtgggaaggagaatacacctaccgctgcatccttacaaatgactacgagtcttccgagaaagagattgtcgaattctataacctccgtggagggaaggaacgcatcttcgatgatatgaataacggattcggctggaacaggcttccaaaatcctttatgggagaaaacacggtgtttcttctgcttatggcactcatacgcaacttctataaattcatcatggcgaggcttgacgtgaagaggttcggactcaaagcaacaagccgcatcaagacgtttgtctttaagttcatctctgtgccagccaaatgggtcaggacatcaaggaagtatgtgctgaatatctattcatgcaacaatgcttatgccaatgtgttccagaatgactttggataacaccgacaacttatagtcgtgattttgcgtattgcctcaagtcgcatggtggggtaaggggcatttatatgtctttatggtgacattcgatgcactgtgccccctttttactaacgatgcagattcttttcgcttctgtatcatattaggcgcgtagttgcggatttgaggtatataactattgcgacaattacccgttttttacctccttaaaaatattctatgccaacattacacctagtacaacatacaatggacgccaactattgaaccataatctgaataatacccccagtatagaactccaacatgatgagaactacattacactagaatttgcaggacttaattacgtaaatccctctaaaacctattataaatataaactggaaggcatagatactcaatggcaggaagttaaatcttcagatggaataggaaaggttacctacagtggtttaggtccgggaaaatatgtttttcaagtttatacagcaaatagcgatcatttctgggggaaacaaaattcaaaattgacttttatcataaaagaaccttattggaataccatagcagcccgtctttgttatgttttgataataataagcatctctacgtatgtaatttatcatataaacaaaaaaaacaaactcaaattactaaaaacacgccaattggaacaacaaaaacaaaaagaagaactagatcaaatgaaatttcgttttttcacgaatatcagtcatgagtttcgcacccctctcaccttaatcatcacacctttaagtgttattataaatgagagtgaaaatgagaatcttaagggtaaattgatgtctatctataataatgcgcaaaaattattggctttagtaaaccaattattagatttcagaaaattagaagtaaaaggagaaaaaattaatttagggtatggtgaaatttcagatttcatttaccagtgctgtacaagctttcaaccaatcatgacagaaaaaagcataagtttcaaaatagatcttccgaaataccccatatatatgtattttgaccaagataaaatatataaggttatgaataatcttttatctaatgcctataaattcacccctgaatacggcgaaatcagtatacagttaagtgaaggagaagaaaacttcttatttatcaaaatatccgatacaggaattggtatttcagaagaaaatctccctcatatattcgaccgattttatcaaatatcatctaaacagtgtgaaaacaccggtagcggaatcggtctgcatcttgccaaagagtatataaacctacttcatggaaaaatagaagttaccagcattgccaatagaggcactacatttacaatatgtctccctaccaatctgcatccacaagaaaaaatggcagcaaaagaagatgtacaggaaaacaatgaaaatgactcatcctccatttcaccaaacaagcctattattttattggtagaagataatacagaatttagaaatttcctaaaagaggaattaaataaatggtatcaagtaatagaagcaaaagaaggattagaaggtgaaaaaatagccattgaaagagatcctaacttaataataagcgatgtgatgatgcctattatgaacggaatagagttatgcaaacggctgaaaaataatattcaaacatcccatattcctattatattactcacagcccgcatatctgatgaagataaaatgactggttatgaagcaggagctgattcttatctatcaaaaccttttaattttgatatactattaactcgtatacggaaattaatagaacaacaagagaatagaaaagcaacatttcatagaagtatagaagtatcacccagcagcattaccatcacttccttggatgaaaaattagttcagaaagcattgcattgtgtagaagagaatatggaaaatcctgaatattctgtcgaaaaattagctgctgatataggaatgacacgaatgagtttatatcggaaattacagtcaatcacgggacaaactcccacagaattcattcgtagcattcgattaaaaagggcagcacaattgttacagaattatcagctctcaattgtggaaattacagacatggtaggcttcaatactccacgttattttactaaatgctttaaagaaacattcggaatattaccatccgaatattcaaatgctcatagaaaaaagtgattcttttaagataatcagattgaatataagggattactttgtgtatacgggcggaagcattctgttcctacggtggatgaaaaccgaaatggaaatgagacggaatatatgtaagcatttgaacaaatacacattgtacactctagggggtggttgtaattttgtgctcgcaataacagccagccccaattataatgaacagatcagaatttgaagaattagaattgcaggtgcaacaaagtggcctgctattgaagtcgtacctacaacagataggtgtaagtcattcaacatatcactactggcacaaaaatgttctgtagataaagacagtctcaaacaagggttgactccaatcagtttcagacaaactactacggaattgaccttgggaaaacaagtgtcacagggtgtatttttgctatttcccaacggactccgtgcccattttggaagtggatcagagaaatagttgatggaactttcgccccaaagtctccaaggctgccatgtttagtctgaacgacacgatgtgctactttttgtgtcccggcaggacggatatgcgcaagggtatcagttcgctgtgcggacttagacatgagaggatgaagagcgaagtgaagaacggcgatgtgttattttcatcgggtttggccgtaaactcatgaagctgcttcatgcggaagatggcggcatggttatgtacatcaaacggctggaggcatggcgcttcaaattgtcggaatacgcccctgagtcaaacagttatcccatggaatggcgtggccgaaggcattcaggaaaacctggaacagagactccggcgaaatgcaaggagtaccatgtataatctgttttattgaataaaaatgctgagattgttgtgtaatctataaacaattagtgttttacattggtaaaaaagacaggaaatggacgaaaaggatatattactcaagacgatagaagggttgaatgcctctgttgcttcattgtctgccatcaataaagaccaatcggaacagatcaagaatctgaaggaatgtatcaaggagttgacggcccgggttacatggctgaaccacctgttctttgagcgtaaagctgaaaatctcccagtctatagtccccggcatgccggatctctttacgaatgaattttctggactgtaacgtcaggcaagaagaaaggcatgacgaggcagtggaaaagatagaaaggaattatctgaaaaaaagaaacggaagcactggaaccgtaaaatgattgaagagcttcccgtgcttgaaacagaggtgatagagccggacggtgtggacctgtccttatatcgtagaataggggaagaggtaactcgggttgtcaggcacaaactggggatgctttatgtaaaggaaatcaatgcgctcaaggacaacatgcagcttccatccgagggacagaaaagtgtggaggttgctcccatgccgctgatgcctgtcgacaagtgcatcgctgattcccagtctgcttgctgaaatcctgctccataaatattcataactgtcaatataaaaaattaataatctaacaacgaaatttcaagaagctctaaatcaggaatgaatatactcaatgtgggtaactgagaagatacatgatgggaataaaactagaataaatctctaattgtttgttggacaaagtaagctctttcatttggattatgcactatatttctgcttttattccatattatatatcatttattattataaatggtcggaaattaacacaatatggaatgaaaacagggttttatggggttattgagtgctgacaggcggtttctccctgtattgagtaggggagcaacctgtatgctgtttgaatacagtactgaaatatctggcggttgagaatcctgtcttatctgctatgtcattgacgctgagttctgtatggagaataagccagatagctctctccatacgtatttgggttatatagtcattggctcccatatctgtcaatgcttttagcttattgtataaagaagctctgctgattcctattttgtcgcaaatgaatggaatacccaactgttcgttatccagatgttctgtgattatctggttcaggcgatttaaaaattcttcatcggcagaactgaaggtgccttcctcgggtggcggcagagggccgatgtctgtataacgggtacgcatccgttcccggttatgcagttggctacagataatcgcatatagcatacttacttcaaaaggttttgtgacgtaggcgtctgctccgtttttataaccatatagttggctttcttcgtcattacgtgcagtgagcagtataaccgggatatggcttatttccaaatcttcttttatttgtttacatagctcatagccgttcatacggggcatttggatatcgcttacaactatatgaggacgttttttccggcaaagacgcaatgcttcctctccatcggcggctacccatattgttttaaaccggtctttcagggctgttgccagataatcggtcaggtctttgttgtcatctactactaataaggtatggtttggggctgttttattttcttcctgttgtttgggaatactttctgtttcttgcgtgggtgccagaagtgtattcagatattcttgtgggtgcagcgtgatatttcccggttcggtatttaatggaagttcgaaccagaaagtagctcccgggcttccgaaattcttgttgtcgtaggctccaatgttgcctccgtgttgttcgaccagtattttagaataggacaatccgattcctgtgccgggacgactgttgttgccttggtaaaagcggacaaagagattgttggtatccacatctttcagtcccggaccttggtcggaaatggatatgcgtactcttgtcttgtcttccgacaaacgggttgaaatactgattgtactctcatcgggagtatatttcaatgcgttaattaatagattggtcaggatagtcgtacatttttctttgtcgaagcacaaggtctgaatctccggttcaggttgatagacgagcgtgatgcccctgacggaggcttctggtttaaaatcggaaatcagttgctctgcccattcatccaattgtatgctctggacatggagtgtgctttgtcctacttccatcttgcgaacattcagaacagtattcagaatgttcttcatccgttcagattgtttacagatgctttggatcaacggataattttcgttgtcggcggtaagtttatccattagttgtttcaagggtgcatgtatcaaggtcagtggagtccggagctcatggctgatattgataagaaagcgtactttttcttcgtatacctgctgctcatgttctttcattgcccactttaacttggtttctttgttacgcaataacaggatgaaaatgaggataacgctaacgaagataaaaagggtgcaacttaggatgaaccagccagatttataccaaggaggcagtactatcagggtaagaatatcatagtctgctgtccagtcaccgttgcgggtactgcaggcggcttttatgtgataactgcctgttggcaggctgcttaagtttatttccggtaaataagaatagatgttttgtccgttcagtcctgtaatggtgtatctatacatgggtttgcggaaaatatccttattacgggtgatgattttgatgatgatcggtttgcttttttcattgacactgagttggtggtcatttgatatccggtcgtagacacgttctccgcccactaggatgtcggccagttgaagagtggggagaagtgccggttcgtcaggtaagtgccggttgatatgtagtaagccgtttacacctcccatatagatatctccggatgaagagagtaaccggggtttctccagatattcgttttgtaccactccgtccggttcaccgaataagatgaatttcttttctttaatcagatatgcgaataatttttcttccgttcctatccatacacgcccttgccggtcacaaatgagtgagcttatttcattaatcagggtattggggacaagggtgtattgcttggtaaccggattataataacttaaaccatagttactgcctatccatagcaatccgttctcgtctagtgagacagaattgaacacggtgtctgtttgacaggtaaatataagctccagttcgttgaggctggagttgattttatagatatgttccaaatcgtgcagatagcaatcctctcctgtgctgtttatgggtaacaatgtaccgacaatatcagtgatgccttttcctttggtgatgggaatgaattgctttttaccaatatggtatttataaggtgtttcggataacatcaaaatggtttcaggagtattttgatatacattgactgtttttccccgatgacataaaatatcattaatgctgtcgttgataatgacaagtggctgatatcggtgggtttctttatgaaagacaaacaagccttggctgaatagcgaaaccagtagatgttttttgtccatgccggtgatggaagctaccttttcttcccaggtagaaagtatgtgatgaaactttccggtgaccgggtcgaagaggttgataccgcctccgtctgttccgatccatatttggttgtcattgtcttgataaatggacaggattgttttctcgctcagcccgtaattctgtcccggcagcacgtcttgataagttttcattcctacctctttaatattgattaatccgttgcgtacacttcccgcccacatattgttgcttttgtcgttatatagacaaagaatagagttggcaggcaaggagtaacgatctcccggaatatacctcaatgtcgatatcttgccggtctgcggattgagaatatggattcctccgccgtctgtacccatccatatttgtccattatgctcttctaatgatagcactacattggttttgagaggagaattttgtgtatgataggtctgtaattgttttccattacggccataacagcttactccctgattgtaatgagctacccatacatttccttttctatcaatcaacaatgagataatctgttcactgttgaagggaacaggacgggtgttgcccgtagcgatatcaataaataaagcttttgcccatcggttggtggctaggagagtgtgggaatcccattggtaaagattggaaatatgatacttgccgttcggtttcaacgtatggaacaggttgataatatggtcttcatagttgtatttgtatagtcttcctcttcccccgaagattactccgtcctcccataggcaaagagaactggctattaccggattgttgtctttatcccgcacaaggataaaattgtcttctatttcattgtagcggaatactcccttttctgtgatgacccaaatggtatgttcttcatcttccaaaatatgtgtgacattaccgcgcagatatcttcgctgttcgtaaccgtcgaatcgtccgattcctgagcgtgtccctatccagacatatcctttttcctgactgacttccatacagcgtaccatggaggaaagtccgttttgagagggaatttgttggaaaaagtattgtttggcttctgatatagaatgtaatagaatgaatagaaggagcaaggacaggattcgtatgttgtgggcagatgttttcattacttactcaaggtttgggaacaaaaatagttgattgtcttgaataacacaacaaaaagacgatgaataatgtggacaaccgataaaaatctcttttttgctgattaatccctgtctgctccttcgtttcctttatttttttatagcatcataaacagcttttgccatcaccttcgctccttcttcattgggatggatatgatcggggaataattccggcattccatccattgcgctgtgaaggtcaatgacaggcagcttgtttttcttggcaaccttcttaatcataggtataatctcttttgagatgatatcatcattaatgctttctccggtaagatatgcctttgaaggatagcatagatagatttcaggttgtgagggaagggctttaaaggcgtcaatcatggtttgtgtatcttttatgaaatctgctttatatacccagttaaatgacttgctgtcattagttcctagtttgataacaacgatattggggttgaacgccaatgcttgttgataagcttgttctttcatataagggtgatcacctttattcagcatagtacgtgcgctgactccaaagtttttcacccagtatttatctcctaacaaacggcctagaacggcggggtagctgtcgtggctccggtttttgattcttgctccgtaagtaatgctgttgcctacacaggctacacggacagcatctttacggggagctttgaaactgcgcaaccaggcagataaatcgtttaacatctcattcttgtaaatgaagttttcgcggataccccagccatgtccgccactggcataaatatggagtacggctggtacatgattcttgtgtagccctaggtaataatttactccattggcaggaggaactgtcttgtcatcgtcactgtaggcgataaaggcgcggggagtttctttggttacttgtttctcattggaaaattcggtttccagttcggcggaagcgtctttacctaaaagattatcgtgagaccctatgtgagtataggatttatccatggtgatgacaggatagaataggatttgaaagttagggcggagttcggggcgggtatgtgtggcgatggttgaagctagatgccctccggcagaggagcccattatacctatatcatatggattcagattccatacatcggcactgtcgcgtgccattttcatggcagcttcggcgtccgagatggggagagtgcggtcaccatgaggcatcctatatttcagtacaatcagtgcgatgccttgtttgttgaagtaaggtgcccagtcatagccttcgtggttgacagccagtccgccatatccgccacccggacaggctactatggcacggcctgtcgctagctcgggagccggaaggaagacgcggagcgaaggggtgtcaatatcaaacggttggggagccttttgggcggccaagggaaaagaggctgataagaagaacagcaggattgttaaaatagaaagttttagtttcataatatattgattaatggataaaaacatatttggagatacaaagatacttgtttttgtatttgggtcggttgtcattgtctttaaaaaaacaatagccaggtttccgactttgtttattcctcctccaaaattgactatttctcggtgaaatggacctttttagctaattttggacttaaaaatagtgattattgtacctcttatacctctgttttcctctacatttgccacaaattaaaataatgttaactatcataaattactaatttaaatttaattctatgaagaagaacctctttaacgtttttctagtgtgtgtcttctgtatggcagcaattccagatatgtttgcccagcagataaaagtaacaggtaaagttactgatagtactaacgaggggatgcccggtgtgaatgtacaagtgaaaggtacaaccacgggaaccattacagattttgatggcaattattctattgatgtccctgactccaaatctacattagtgttttcttttattggctatgtgacccagcaattgccggtaggagggaaaaaagtattgaatgttcagttgaaagatgatactcagacattggatgaagtagtggtagtggcttatggtacggcaagaaagagtgatttgaccggtgctaccgccagcttgcgtccggatgctaacgatgcttctaaaacagcttcttttaataatctgttgcaaggtaaggtggcggggctgaatgtaacttcatctatggctgctccgggagctgccagttctgtgacaattcgtggcgctaactcattgcgtggagataaccagcctctgtatgttattgataatgtcccgcaatcttccaccggggaatttgcagaatcggctatgggtggcggtgatttccaaattgcgcaagatcctttaagtgctttgaatcctgcggatattgaagatatcactgtattaaaagatgcctcggctacggcaatttatggttcccgaggtgcgaatggtgttattatcattacgactaaaaaagggaaggcaggtaaggctaaagtaaacgtgactgcaaactttactattgcggacgcccgtaacctgcataatatgttgaatctggaacaatacgctgcttatgccaatatgaaggctaattccggcgaggaaaagtactatccgcaagcaaatggcgagatgcattatgtgtatggtgaaaacttggataaatataagaaagatcctaccaaccctgaatactatcgtgtcttgagttataagaactggcagaaagaagcctattcatccgctttctctcaagtttattctgcatcggtcagcggaggatcggatgcaatgacttattatgtttcgggtggctttaaggatataaaaggtattgtaagtaatacaggtattaaacaaggtgatttgcgtgcaaaccttacggctaacctttcaaagtccgttactatggcacttgctctgaatggatctatcaaacaaaatgatatgatgaccggaggtaatacgacaggtggtattgccggttcattggcacgtacagtactggatacagctccttatgaaattccggcagacgacccgacattacaaacggacatggatgcaaaaactactgtttatagctggcgggatgactatgatgatataacggatgataaaagctttggcggtagtctggatttgaaatggaatatttgcaaatatctttcgtataatcttcgtgccgggggaaatgtgaatataaacgaacgtgctcgttggtatggtatgcagctcactatcggtgctaatgatcaaggtgtgctagccatggctaacttgaataagaccaattataatatagaaaacttattgaatttaaatattgacttggcgaaaggtattcatctgggagctactgctggtgtaacttatgacggacatacattcttgaataagaatgtgaagggtactcgtttctctaattttgacttacgtacaaaagggttacaccttgcttctgtgaagactcatgaacaacctacccaaaaggattatcagttactgtcttatctaggtcgtatcaatctttctgcttatgataaatatttgcttactgcatctgtacgtgcggacggatcaagtaaattcaaaaagggtaaccgatggtcttactttccttccttctctttagcttggcgtatggagcaggaagaatttatgaagaatattaactggttgaatcaaatgaaaatacgtttaggttttggtgttacaggcaatcagggcattaatccttatgctactttctctgattattcacaaataatagattatgcaaaagccacaggggatcagattttggcaatggcggtaagcaatttgcagaatgacgggttgaagtgggaacgtacatcttcttggaatgtgggttttgattttgcttttttcaacagccgtctgtcaggatcagtagatgtatatcagaaaaaaactaatgatttgcttatttcgcgttcattgcctgcttccagtggttttgcaagtgtgatgttgaatcaaggttcgttgaaaaacaaaggtgttgaaattagtttgaatggagatattctccgtaacttgaacggttggagttggagtttgggcggaaacattggttttaataaatcaaaaattggtgatctgggttttgcaccgacagattttggaaccttgaaaaatgtgcgtggatatcagggaacttctataggggatcattttggtattgctaatcttttcattgcaggtgaggcaccgggattgttcttcggatataagactcaaggtattattcagccggaagatattgtagatggaaaagttgcttatacggctgctgacggatcaaccaaatattattccagttctgtggccaatgacttgggagccggtaatataaaagcggtggatatgaatgaggatggtgttgtggatgaaaaggataaaaccattttaggcaatccgaatccggactttacttatggtttccaaactcgtattgcctggaaagacctgtctgtctcggcttcttttaatggtgtgcatggtaatcagatattgaatacgaatatccgttattatacgccctctcggcaagctggtaatttgacacaagaagcattccggaatatctggacggaagaaaatcattcaaatctttatccgtcggctacggcgaatgtaaagaacgtggtttatgaccgttatattgaggatggaagttacttgcgttgttcggatatcactttgaattatacattgccaaaatcttggatgaagaaaatcggctttcagaatataggtgtatttgcttcggttaaaaatgcatttgtcatcactaattacagtggatacgatccggaaatcaattcgtttgcttttgatggattacgcccgggcattgatatgaatgcatttccaagccaacgttcttatgtctttggattaaatgtggccttttaaatagtttaaccgataatttttttgtaaaatgaaaaaactaaaatatatatttttattagcaggtgctttgttattggcatcctgcgaatcgtggctggatgaagacccgcaatatacgataaatacaaaaactcagtttagtactgtggaaaatgccaaacaggctttgatgggatgttacggatatatgtcggctgataatgcttatggccaggcatggcaggaagtaacatttggatattgtggttttggatggtcacaaacaaatggcagttctacagatttattggtctctatggacggaggaattgatgaaactataaacacaatggcgtggagagggatgtataaagtgattggtgaaacaaatgcattcattgccaatattgccgatagtccgttagaatcggctgataaattgccaatggaagcggctgctcgttttttgcgtgcattggcttattacaatttggcagttacctatggagatgtacctttaaagaccactccctctgctcatgacggagtagctgttcctcgttctcctaaaaatgaggtctttgaattggtacgtactgactgggagttcgcttatgagaatttaccggaaaaagatgatgacggttttgcaacgaagtgggcagcgaaagcgtatctaggaaaactttatcatactttgggctgtcagggtgataatacggcttgggagaaggcgaaagcgtgttttgatgaggtaatgtctaaataccggctggcggataaattcagtgatttgtttgttgattatgtacaaggttctccggaatctatttttcaattgaattttgcacttgcaggttctaccacccgtaaccggggtagctggctggtcgctcctaatggctcttgtaatgggcaggcttgggaccgcatacgtgcttcaaaagctttgtatgattatttttgggctacttatcccggtgatccacgtattgaaagcacattcctgacttattggaagtcttatgccggagtaggaaaaggtgagaaacctaaagaggagcctatagcttcggcgcgcgatactgtatatgcatatccttattttacatataccattggaggagaagaaaaacctgccggatggaagaaatccaagttgtatgtaggacggattccttacgagaaattagctgatccggctagtccgaaagctgaagaactttatgctatgattgccgatacggctactgcgactcccgctgaaaaagggtatttgaaaggcttgttgtctttgttggaaaatgcgacaaaaaagccatctaccaatacaaagtcatggccctatttcaagaagccgtgggatcctgagcagagtggtaataacagtcataagaatttaattttgtatcgttatgcagatatgttactgatggcagcggatgtatataatgaattggggcagactgataaggcgataacatttgccaatgaggtgctgaagagagcgcgtcaatcaggaaacgcgtctcagccggctgactggaggagtggcttgtctaaagaacaagtgcgtgagaaaatttattttgaacgtatttttgaaggtgccggtgaaccggaaatgtatcagaaaatgcgtttacgcggcacagagtttctgaaaaaggcttttgaggtcaacaatgggcatggaattattcaagaatcagtggccaataatcctaaacggaacggcaattggggagaacgtatttttaatgatggaaatttgaatgatgaaaatttcttgaagaaaaatttattgctcccggttccgaaagatgagatagacaccaattcagctcttgactatagtgacaataattatggttatactaattaaggaaacatgatagaacgctttattcaataggtctttattggatttttccggatgcagggcgcacctgcgccttgcatctgtttttttcttgtctgtaacctgtttctggacattctcagatataaaatagtcatttccagacaagaaacaataatataacttgtatctttgcggatgttaattctttgcttatttaaatttatgaatatgaacaacctacaatcaggattatttttttctttgaccggcattactgctgtggcatctctgtcatcatgcgcttcacaaaagaaaactgaggagcagaaaccttacaacatcgtgtatataatgaccgatgaccatactgcccagatgatgagttgctatgacaagcgttatatggaaacgcccaaccttgaccgcattgctaatgatggagtgcgttttacaaatagttttgtggccaattcattgagtggtcccagtcgtgcctgcatgattaccggcaagcatagttgtgctaataaattctatgataataccacttgtatatttgatggttcgcaacagacttttccgaagctgctgcaacaggccggataccagaccgcccttatcggaaaatggcacttagagagtttgcccacaggtttcaattattgggagattgtacccggacaaggtgattattataatccggattttattacgcaagacaatgacaccattcaaaaacatgggtatataaccaatctcattactgatgatgccatagactggatggagaacaaacgagataaggacaaacctttttgtattttaattcatcacaaggctattcatcgcaactggctggcagatacttgtaacttgtctttgtatgaagataaaacttttccgttgcccgataatttctttgatgattatgaaggacgccctgcggcagcggcacaggaaatgagcatcgtgaaggatatggatatgatttatgaccttaagatgcttcgccccgataaacaaacccgtttgaaggctctttatgaaaattatatcggacgtatggatgaggggcagcgtgcggcatgggataagttttatggtcccattattgatgacttttataaaaagaatcctcagggtaaagaactggccgattggaagttccagcgctatatgcgtgactatatgaaaacagtgaaatcgttggatgataatgtaggccgtgtactggattatctgaaagaaaagaatatgctggacaataccttggtggtttatacttcagaccaaggcttctatatgggagaacatggttggtttgacaaacgctttatgtacgaagaatccatgcatactccgcttataatgcggttgcccaaaggtttcgaccggaaaggtgatattacagaattagtgcaaaacatagattatgcacctacttttctggaattggcaggtgctcctgttcctgaagatatccaaggtgtttcgttgcttccactgttgaaaggagaaaaacctgctgattggcgcaaatcattgtattatcatttttatgaatatccggcagaacatatggtgaaacgtcactatggtgtacgtacagagcgttataaattaattcatttctataatgatattgatgtatgggaattgtatgatttacaggcagaccctacggaaatgcacaatctttatggtcagaaagaatatgaatcggttgtgacggagctgaaggctgaattggcaagattgcaggagcagtataatgatccggtacgcttttcacccgatagagacaaagaataagaaaaatagcatatatcatgaaatacgcttgtttgattttgctatggtcgttatttgcgactatggccttacctgctgacaatctaatccaacctatatctattgttccctgcccggagagtgtcactccgggtacaggttactttactttctccggaaaaacagactttacggtagaaaatgaggagcaggcagaggttgcacgctgtttctctgctctttttacccaggcggccggatttactccttgtgtgaaggttggagaaaagaaggggaaaatcagtttccttaccgatgctgcattaaagagtgaggcgtatcatctggaaataactcccaagcagataatagttaaagcttcagatacgaaaggtttcttttatgccttgcagactattcgccagttattgcctgcttccattgagggcacagcggtggcggaaactgcggattggagcgtgccggctatgacaatcaaggatgaacctcgtttcggatatcgtggattgatggtggatgtagcccgcttttttactccgaaagagaatctgtttcgtattatcgattgtatgggaatgttgaaaattaataccctgcatctgcatttggtggatgataatggttggcgtattgaaataaagagatatcctttactcactgaaatcggttcacggcgtgtagatcgtcctggaaaatcttttccggagcgtcgtaatccccggcagggtgaaccgactgtagaaaaaggattttatactcaggaggatatccgtgagatagtggcgtatgccgctcgacatcaggttgaagtgattcctgaaattgagatgccggctcatagtaatgcggcgttggcttcttatccgttgctggcttgtcctgtggtcgataaatttatcggtgtccttccaggactgggaggaagtcatgcggatgtgatcttctgtgcaggaaatgatagtgtgttcactttcttgcaaggggtgattgatgaggtggtggagttgtttccctccaggtatattcatttgggtggggatgaggctcggaaaacgcattggaaggagtgtccgctttgtcaggagcgtatgcgacaggaaggcttggaggacgaagaagcgttgcaaggttattttatggcgagaatgagtaaatatgtacaaagcaaagggaaagaagccatgggctgggatgaactgaccaatacccggattcccgacggagcaattatttatggttggagaggctacggtcaggctgccgtcaaggcagcggagcaagggcataggtttgtcatgactcctgcacgtatcatgtatttgattcgttatcagggaccgcaatggtttgaacctttgacctattttgggaataatacattgaaggatgtatataggtatgaaccgatacagaaagaatggagtccggaggtacgttccttgctgatgggagtacaggcttctatgtggactgagttttgcaataaaccggaagatgtggaatatcagctgttccctcgtctggctgctttagccgaagtggcttggacacagccttggcataaaaattggagaagttttttggtagcaatggataaattcaacgagcatctgtctgctaaagggattgtgtttgcctgttccatgtataatatacaacatacggtaacccctgtaaatggaaagctacaggtgaaactggaatgtgaacgtcctgatgtggaaatccgttacacaatggatggtaaggagccgacagaccggtctctgctatataagagcccgttgatggtgaccggtacacaaactataaagtgtacgacttatagagcaggtcggcagatgggaaaaacattgacattgcctttggtttggaataaggctaccgccaaacctgttttaggaaatacacaggctgggaagattttagtaaatggtatacgtggcagcttgcgccagtcggatttcgaatggcattcatgggaaagcagtgattctgtcgcttttactatagatttgcaaaagaaggagtcgcttcgttctgtatcagtgggatgcataacgaattatggcatggctgcccataaaccggcaaatattgaagtgtgggtctcaaatgataatcgggattatcgtaaagtatccggtaaacagttcacggatggagagattttccgtgaagggactttcaaagaggatgtggtacttgatttgaataaggaaattggccgttatgtgcggattattgctaaaggagccggagagtgtcctgcaacccatgtacgccccggacaagaggcaaggatttattttgatgaggtaatgatagaataaatagatatatgagaaatacattattatattttttggctgctctggttatatttccagtaatggcgcaacaacaacccgaatggcagagccaatatgctgtcggactgaacaaactggcccctcatacttatgtgtggccttatcaaaccgtatctgatatccgtaacggagattatgaatcttctccttattacatgagtctgaacggtagttggaaattccattgggtaaagaatcccgataaccgtccgaaggatttttataaaccggagttttatacaggaggatgggcggatattcaggttcccggcaattgggaacgtcaaggatatggaacagctatttatgtaaacgaaacctatgagttcgatgacaaactgttccattttaaaaagaatccgcctttagttccatataaagagaatgaagtcggttcctacagacgtacctttacaattcctgccgattgggaagaccgccgtgtggttatctgttgtgaaggagtgatttctttttactatatttgggtgaacggacatctgttgggctataatcaaggttcaaagacaccggccgaatgggatatcactgataaattgaagaaaggtgagaatacggtggcattggaggtttaccgttggagcgccggatcgtatttggagtgccaggatatgtggcggttgagtggtattgaacgtgatgtgtatctttacagcactcctaaacagtatatagccgattataaagtaacctcttctttagacaaacaacaatataaagaaggtattttcggtttggaagctaccattgaagggccttctacttccatgactacctttgcttaccgactggaagataaaaccggtaaggcggttctgcaaggtgaatatcctatcaaatcgaagggattgagccatttcttgaagttggatgaacaaagtttgccggatgtggaagtctggagtgctgagcatccgaatctttatacactgatcttggaattgaaagatgtaacaggtaaagtaacggaacttaccggatgtgaagtaggtttccgcacttcggaaattaaggacggacgtttttgcatcaatggtgtgccggttttggtaaagggaacgaaccgtcatgaacattcccaattaggacggactgtaagcaaggaactgatggaaaaagatatcaaattgatgaaacagcataatatcaatacggtccgcaattcgcactaccctacccatccttattggtatcagctttgtgatcgttatggactttatatgatagatgaagctaatattgaatcacacggcatggggtatggacctgcttcattggccaaagattccacttggttgcctgcccacatggatcgtacccaacgtatgtatgagcgttccaagaatcatccggctatcgtcatctggtcattggggaatgaagccggaaacggtattaacttcgaacgtacatatgactggatgaagtcagtggagaaaagtcgtcctgtacaatatgaacgggccgaacagaattataataccgatatctattgccgtatgtatcgcagcgtggaagaactcatggcctatgcccgccagacagaacctaaagtctatcgtcctttcatcatgacagagtatctgcatactatgggtaatagtggcggaggattaaaggaatatatgcatgtattcgaaaccgaaccgattgttcagggaggttgtatctgggattgggtggatcaatctttccgcgagatagataaggatggtaaatggtattggagttatggtggggattatggtccgaaggatgtgcccagttttggcaatttctgttgtaacgggttggtcaatgcagtccgcgaaccgcatccgcacctcattgaagtgaagaaggagtatcaatatatcaaatcggcactgaccgatcctaaaaagctgacagtggaagtcaagaactggtatgactttaccaatttgaatgcctatacgttgcactggcaggtcatgggggatgatgggaaagtgatagcagaaggaactcgaaaagcagactgtgtccctcatgaggctgtaacattctctttgggtgctgtaaagttgccttctacgattcgtgaggcttatttaaatctgtcttggacgcctgataaggcaactccctttattggaactcatgacgaagtggcctatgaccagtttgtactgtctgccaacaaagggtaccgtgcgccggaaatcaaattggctgataaggtgaagatagatattgatcctgcaaccggcgctttacgctcttatatatataaaggtaaagagatgctttcatctcctgtagttctcagcctttatcgtcctgttacggacaatgacagcagggaaaaaacaggaggagccaaagtttggaggaaagaaggtttggataatatgattcaaaaagctacttttgtcaaagcatctgaaactggtggtaaagcggaagtagagttatggaatgctaaaggcgtaaagttgggaatggctacctttgtatatatcttgcagagcaatggtgcattaaaagtaaagacaactttcttgccggatacttctgctgttacttcattggctagagtgggcctggcatttgaaatgccgtatgcctataacaaggtttcttatttgggacgtggtgaacatgaaacttatatagaccgtaatcagtctggatgtatcggaatttaccatacagatgcagaacgtatgttccattattatgtgaagccccaggctacaggaaaccgtacggatgtgcgttggatggaattggcggatgaggcaggagaaggtttgtctttccgttcggataaagtgtttcagttctgtgttattccatttacggattctaatgtagataaagctactcatattaataaacttgagagaacagggattataaatgttcacttagatgcggaacagtcgggggtaggtactgcgacttgtggtccgggggtattgccgccatatcgtgttccggtggagaagcatacgtttgagtttatgatttgtccattaaaataacctagtaataaagaaaaatgagaaaaacgattctaaccgcagccttactttgtgcttttctgggaactcaggcacaggagtattatgagaaacacgtagcttttccggcaggagcgactacggcacagaagatagatatggcttcccgcttggtgcctacaccgcaacagttggcatggcaacaaatggaattcacttgtttccttcattttggtattaatacctttacaggccgtgaatggggagatggtaaagaagatccggccattttcaatcctaccgaattggattgtgaacaatgggtaagagctctgaaggaaggtggcttcaaaatggctatcattactgccaagcatcacgatggtttctgtttgtggcctacccggacaaccaagcattcggttgcttcttctccatggaaaaacggaaaaggggatgtggtacaggagctccgcaaagcttgtgacaagtatggattgaaattcggagtttatctttctccttgggatcgtaatgcggaatgttacggacaaggagaagcttataataagtttttcatcgaacagctgactgaactgcttaccaattatggagaagtgcacgaggtatggtttgatggagctaatggcgaaggacctaacggaaagaagcaggaatatgattgggacgctattttgaagactatccgtcgtcttcaacctaaggcagttaccgctatcatgggcgatgatgtgcgttgggtaggtaatgaaggtggattgggacgtaccacggaatggagtgcaacggctttgatgcctaattcttatccgggttctgatgaagtctataagagattgggcataaatgctatgtccaaggatttgggaagccgtgaattggtatctaaagcatcggatttgttctggtatccttctgaagttgatgtttctatccgtccgggatggttctatcatgccgaacaggataatcaagttcgttcacttgccaacttggtgaatatttattatcgttctgtgggctgtaactctgttttgttgctgaatattccacccgataaacgtggtttgatgcacgagaatgatgtgaaacgtatcaaggagttgacggaatatataaaaaagacctttgccgataataaagttgagaagggaaatagaatatggacagccaaagtaggagatacgaaagaatataaggtgaggaagaatacacttgttaatactttcttaattcaggaggatattacaaaaggccagcgtgtggaaggttttacagtagaagtgtttgccaatggcgcatggcatcatgtgggtgagggaactacggtgggatataaacggttgttgcctttctcggatagttatgccgaaaaggttagagtgacaattacgggtgctcgtggaaccgtcaatatcagtaacatcggcttgtattatgctgaaccattggttgataaaacaatgaaagtaaccttgagtgatgtcccggtggatggttggaaaacagtgggcatggatgcagccgcagccattgatggaaaacaggaaactgtttggaaaaccgaaactttaactcccttggtggttgatatgggtaaagaagtggaaatagccggttttagttatgctcctgcacaggaggaggatctgactggcactatctataaatacaacttttatgtcagccggaatggtaaggattggatgaagtgtgacgctacaggtgaattcagtaatatcatgcataatcctgttccttattttgtacgtttcggaaagacttatccggcccgttattttaaattggagcctgttaccgaaataaataataaggcagtaactgctgttggtgagataggagtactgttgaaataaatcagattaatatattttttatttcaggagaagttatgttaagccgggtgagagaatcatctgggttttgacataacttcttttgtatatagagggcatatgaaggaattagctaataatctgttaagaaccttccggattttgagaaaacgtattatatttgcataaacataacggacattcaactttttgattgattgtagaaagcctttgtttaatcgatatcacttaaatgagtaaaattgaatatgaaaaaaagcctgtactttctttttatattagccttgttctgtttgacaggctgcaaggatgcacttgtcccgaaacctataaagctcacttgcaatatcaatacatttgacgctcctatatcatgtatcagccgttcgacagcagatgcggataaactttatattggtcaggaagacggttgtatcatagaaaaagtgaataataattgccagacctattccattaatagcaaccggcgtatatatgatatattggaatatagtgaagattctctgtttgtgggaacaagagatgctggtttgaagctgctggctaaatcctctcagcagacccagacttactacataaaaaataagaggatgaattattcggtatatagtatgactttggatgatgataaacagtgtttgtatgtggggactagtaatggactgtttagattgaatttgaaagatggttccacatctcatgaacttactcccattcaactagggaaatgtagtaaaaactgtggggtgaacaaggtcgtgataaaggaaaaaagactatatgtggctagtgaacaggggttgttcgttgtccgtaatcttgaaacggattttaaacgacctgttatagattctctggttaccaatgtcagtgtttataatgatacggtatatgctttgttggaaaattcggttttcaagatagctcccgatggaaaaaagacgtttgtacacaaaggacggtgctacttgtatgctcaaggccccgacaaggatgaatggtttatcagtgctaattctatactttatgttaaagacggttacactttaaaatatgatttgccgaatggagtcagtactatcgccagacagataggctttatggggaaagactttctgcatctggcatgtaaagaggctatgctttcttttgccttgcggcagaactcggcagatttagacaataatgtattggcggttagtgataaaaggacgggagactccattttctttattaccgatgatcttcgtttacatctgtataagttcgtctataatcatccggaattcaaatcaaagtctttaggaaagattgaaggtttggatattgtgggtaatgatattataaaatttttggaaaccagtcctaatactttctttcttgctacgcgtaagaaactttataagattaaaagcaatagagcggagtgtcttttgcagttcagtaacacgaaagagcagaataatatcacttctctttattattccaccgcggaacattgtctttatgtgggtactagggaatatttaggtattatagatgaacagcaggaccatattgtaacttctattccggtcgtgtcagataagggggagaaagatactatcgacgcttatattaccggaatttgtgagaatgaggacagtatttatgtaacgaccttgaacaaaggattgtatggaaggcctttaaacaggccgcaggaatctttctggcagatacgtgatttatcagggtatgagagtgtttatggtgtgatagtgaatggtagaaataaatacttgaatacctcgttgggaatcgttaatgaggaaaatgcgaccttgctgccagtgaaacatgtgaaatcaatatcgggagctcttgaaaagaatcctaatgagggctttttcatactctattattatggcatgagttttaagggattggatgatgccggtgttccagaaccattattctgcgatttggcttttagcaagccttgtattgccgtcaatggacggaaagcggttttgggatgtaagtcaggattattcctttttgatggtaaatcaggcttgcttcctatcttgatagaaaaagaagagatgtcctatgcgctgtatatcatcctgtcaatagcagtgctgctatcggcttttcttgctcttttccttttgaaaagacggaaaagagaaactcggaaagcactgatggataaaaaaaggataaatccggatgatgtcgggatgaatggggaggaactggaaatggatgttcatgaggttgccaaaaaagtcaagaccctgtttgatgccttgggatacagaaaaacagagggagaggataagatgcgtcaggaactgaaacaggtgtgtttggattttgctgacaaatatcctgaattgggtaaattatcctttatgaaacgaaggggaaaagaaagatattttataacgatacttctgatgatagaagatattgatgctactattatttcaagagtgctggatgtagatcaggcaacggtaacaagacataagtataatgtaaggaaagaaatagaacaactttatcctgagggggagtttgattgtaaagtcatcaatctgctttatgaccgtatcagttcaagaagaaaataagttcatctttagagttatctcaatttactgtatttcgtagagccggtttcgtgtatctgttttattataaggaatggcttttttgccggaagtgctgaaacacttccggctctcctttttctctccttttctcttctaggatgttttggtcatataaaaggaagaaacgggattaaaaaggtattttcgggataatttcaaacactacttttgtttccgtcagatgcggacactctgattgtctgtcgtatgttccgtagatgattaaaatgtttttcgaaaaaccaattgaattttattaattaaccgtttaaactaaacttttatcatgaaaacaaagtttgccttacttctagtgttttgtgccgtttcattaaacatctttgcacaagagaaaaaaataaaggatagaagaaccaatcccgaactttattatttggaagaatctgaggttgccaatagtctggagttgctgcctcctcctcctgaagccggaagtattttgttcttgtatgacaaagcccgttacgactgggggaaattgcaaagggatactcctcggggtgaacaagctgccagtgatgcccgtgtaaatggtgatggcgttccctttgccttttcggaggcttttggtattgaaataacgagggataaaacaccagaactgtataggctcattattaatatgagagaggatgccggagatttggctacccgtcatgctaaagagtattatatgcgtgtacgtccttttagttttttcaatgaaatgacttgtaatcccgaacagcaggaagaactttcaacgaatggttcctatccttcgggacatacagccataggatgggctactgcccttgttttggcagaagtcaatcctgacaggcagaatgagattctgaaaagaggatttgaaatgggacagagtcgtgttatttgtgggtatcatttccaaagtgatgtggatgctgcccgaattgtggctagtgctgttgttgcccgtctccatgccaacgatgcttttgtgaaacagcttaataaggcgaaagatgagttttccaagctgcaaaaagcaggactcgttcagtctgtttccaaaaaataatcccctataacttaaccataagccgtaactatttaatgtaatgtttttcttagatgaaccggacaagcgtttttgctaatcctaaaagcatgactattgaccgggtgctgatgggaggaagaatctggttgattgctttcattgtgtggccttacagattcttcactgccctcagtatgacaaaaatcagagaccgattgacaaggcacttagatggttaccattaaaactgtatattatgaaaaatcttgtatcattaggagtctttctcctgatattgctctccgtacaggtaaatgcacaggaacaatcagtcttgcaaatacgtcctacgggacgaatcttaatggatggaggcttgtttcattcagataataaaaactttgtagatggtgtagcgattcctgatgcccggataggtgtaaaagcaacctatggaaaatataaagcgaaagtggatataggctatgcgtatggaaaggtcagtttaaaagacatatttgtagaaagacaattttcctcacatgcgttattacgtgtagggaattttgtacatcagttcgggcttcaaagttctactagttcgtctatgaaagtaaccatggaggagccggcaagtaatgaggcttttttcaacagccggctgatgggagctatgtttgtgtatgacaaaaatgattttttcggtacagctagtgttcatgtggagagcgaggctcttaagaagaaatccaatgaattgggtaaaatgggttatggtgctatgagccgcttggtctatcgtcctttacatgatacagggagattgtttcagttgggtatttccggtgcttacgaaacacctagatacaatagtgaaccgacacttgaccatactagctttgacttgggggctaattttccgacgcgtattgcaaaagtcagagctgtgaatgccttgattccggatgcaaagaacctgataaaatttacaccggagatgatagcaggatatggtcctgtggcattggaagcacaatattattatcttcaagtgaatcggaaaaaggattttaagaattataaagcgagtggtatgtatggaatactgagaggtttgctgataggtggtaattatagatattcacatacggattgtggtattgccactccggactctggttcgttggaatgcgtattcggatataactatactgatatgtcggatacccggtcccatatttatggcgggcgtttgaacgatgtctcttttactgtcaattattatatcaataagtatatgatatggagattccggtactcttatactaagataacggatagagtgggatttgaaaatcagtcattaagtgcgtttcagacacgttttcaagtgatattttaaatagagggtcagagtttcattttgtttcaagagtttgaagcaaggtggaactcttatatttgaaacagattgggtggcaagaagaatgtccttttggaggaggtagagggtagcataaacctgttactgtaagaacgaatattgaaaaatagctttatctttgtattctttatactaggaattaaatgaaaaacaaatgaaagaagcaaccataactccttttgcaaagccgctatatataatgaccaaacctgtaggtgcggtttgtaatctggcctgtgattattgttactatttggaaaaatccaagttatatgaggaacagccgcgtcatgtgatgagcgatgaattactggagaaatttattaaagaatatattcagtcgcaaaccatgccgcaagttttgtttacctggcatgggggagaaactttgatgcgtcctttagttttttataagaaagccttggaacttcagaaaaaatatgcaggtggtagaaccattgataattgcattcagacaaatggcacattgctgacagatgaatggtgtgaattcttccgtgagaataattttttggtaggcatttctatagacggtcctcaggaatttcacgatgaataccggaagaataagatggggcaaccttctttctataaggtaatgaaagggattaacctgttgaaaaagcatggagtggaatggaatgccatggcagtggtcaatgactataatgcagattatccgttagacttctatcgtttctttcgtgacgagcttgattgccattatatacagtttactcccattgtcgagcgactgtctaaccgtgcagacggtcttcgactttcttcattaaagcaaaaagacggtgaactggcttctttctccattactcctgagcagtgggggaatttcctttgtaccattttcgacgaatgggtgctgaatgatgtgggtaattactatattcagttgtttgattctacgttggccaattgggtgggacagcagccaggaatttgttcattagctaaatattgtggacatgcagctgtgatggaattcaacggtgatgtgtatgcttgcgatcattttgtctttcctgagtataaattgggaaatatttatcagaagactttggtggagatgatgtatagtaaagaacaggaaacttttggtgcgatgaagcacaatagtctgccacagcagtgcttgaactgttcttatgagtttgcctgtcatggggaatgtccgaagaatcgtttcatgttaagtaaagacggtgaaccaggattgaattacttgtgtaagggatattatcaattctttgaccacgtagcaccctatatggattttatgaagaaggaatatctggcggaacgcgctccggctaatgtgatggagtgggcgagagaaaggagaaataaatagactgttttcagtaagccgactgtatgggacaagcaagtcaacttacctagttgtttcagttgacttatttggtcatttaagttactttttcatggctgtttggtttagtcagaaaaaataaaaggagcaaagtctctgcgacttcactccttttgttttttccggtcagatgaattattttccgttgtattcatcagatacagttaatttcttacggccttttgcacgacggctggccaatacgcgacgaccgttagcagttgccattctttcacggaatccgtgtttgttttttctctttctgttagagggttggaacgttcttttcattgtatatacttattttatgttattattcaccatgagtaacgggctgcaaaattagtgacttttttgaaataaacaaagagataactcatttttagtgatttctttttgcgttttttcttgatttacattacttttgcactcgaaatcacagctgtaagtgaatataatctgaaataataatcaaatataagcaaagaaaagtatgattaatgctcaagacattaaaatcggaacagctatccgtatggacggtaaattgtatttctgtattgacttcctgcatgtaaaaccgggaaaaggtaacacattcatgcgtactaaattgaaagatgtggttaatggttacgttttggaacgtcgtttcaacatcggtgaaaaattggaagatgtacgtgtggaacgtcgcccgcaccaatatttgtatatggaaggtgcagactatatttttatgaatcaggaaacattcgaccagattcctattgctcatgacttgattaacggagtagacttcctgctggaaggaatggtggtggatgtggtttctgatgcttctacagaaacagtattatttgctgatgttccggtaaaagtgcagatgaagataacttatactgaaccgggcctgaagggggatacggctaccaatacgttgaaacctgctacagtggaatcgggtgctattgtgcgtgttcctttattcatcaatgaaggtgaaacgattgaaatcgatactcgtgacggttcatatgtaggccgtgtgaaggcataatctatttatatatgcatataaaaaggcggaacttgttgcaagctccgccttttttatgtttctttgtacttctctgtgatggataaaatcaaaataaagcaatgagatattcttttattataccggtttataatcgtcctgaagaggtggatgagttattgaacagtcttacaaggcagacaaataagaattttgaagtcctggtagtggaggatggttcatctgttccgtgcaaggaagtggtagataattacgctgaccggttggatatatgttattatttcaaatccaattccggtcccgggcagacccgcaattatggagcggaacgggggcatggagaatatcttatcatattggattctgattgtattttgcctgaagggtatttggcggctgtcgagtcagagcttcaacagcagaaggcggatgcttttggtggtcctgaccgtgctcatgattcgtttaccaatatacagaaagcgataaattatgccatgacttcgttttttactaccggaggtatccgtggagggaagaaaaaaatggataaattctatccccgtagttttaatatgggggtacgggctgaggtatataaagcgttgggaggattttctaagatgcgttttggagaagatattgatttcagtatccgtatctttcaagggggatatgcttgtcggttgttccctgaagcatgggtgtggcacaagcgtcgtaccgatttgaagaagtttttcaagcaagtgcacaattcgggtattgcccgtatcaatctgtataaaaagtatcctaaatcattgaaagttgtacatttgttaccggcactttttactataggaattgtattcctgttgttatattcgttggtttgtagctggagtttgtctttgctgctgctttttgctcttatcatttgtgtagattccacattgcgaaataaaagtttcaaaataggattattatccatccttgcttcttttattcagttgattggctatggaacaggtttcctgagggcctggtggaaacgctgtgtgttggggaaaaacgaatttgccgcatttgagaagaatttttataaatagaattttaccataaagaggtgtttaaagtgatggactttttatgtatctttatggtggggaaaataaagaaagatggcagaaaaactaaccataaaccaatgggcggaagaagatcgtcctcgtgaaaagatgatgttgcatggagtggggacactttcggatgctgaattgcttgctattctgataggttcgggaaatacggaggattctgcagtggagttaatgcgtaaagtgttgagtgattatcataatagtttgaatgaattgggcaaaacgactgtagatgagctgtgtcactataaagggataggtcctgccaaagctatcaccattttggcggcttccgaattgggaaagcgccgaaaggaggaagagggaaaagaacgtaaggtcattctcagctcccgtgatgtttatcaatatttttatccgttgatgtgtgatttgcctatagaggaatgttgggtattgttgttgaaccaggcttccaaagtaattgaccgtataaagataagttccggaggactggcctctacagcggtggatgtccgttgtgtattgagggaagcattgttgaaacgggccgttgccatggcactttgtcacaaccatccttccggcagtatgcgacctagtacagaggatgatcggttgacggaacatcttgacaaggcggcaaaagtaatgaacataagactgatagatcatgttattttaacggatggcaaattttatagctatgctgatgaaggaagaatgtagaaaatcattaaatttgcaattaaaacaacgagagatatggatgcagatacccgtttaaaaacagaagagaagattatagccatgttgaaaaccgtatatgatcccgagattccggtgaatatatacgatttaggcttgatatataagattgatttgcaagatgatggagaagtagtgttagatatgacattgactgctcccaattgtcctgctgcagattttattatggaggatgtccgtcagaaagtcgactctgtggaaggagttacttcatcggtcgtgaacttggtttttgaacccgaatgggataaagatatgatgagtgaagaagctaaattggaattgggtttcctctaataaattgaaagttgagaattaaaattggggaataagaattgccaatatgtctaagttattggacaaggtgttgttttttaattctctattctcgattttttaatttatgaggtatttaatttagtaagattatgaagaacgtatatttcctttccgatgcacatttaggttctcgtgccatagcacacgggcggacacaggagcgccgtttggtgaattttctggatagtataaaacataatgctgcagcagtgtacctgttgggagatatattcgacttttggtacgagttcaaactggtagtgccgaaaggctatactcgtttcttggggaagatttccgagttgaccgatttgggagtggaggtgcatttctttatcggtaatcatgacatctggtgtggtgattacttggaaaaagagtgcggggtgactattcatcgtcagccgttgacctgtgagatttatgggaaggagtttttcttggcacatggtgacggattgggagataaagatgccaagttcaaattgttgcgttccatgtttcatagtaccactttgcgaacactgttttctaccatacatccccgttggagcatagaacttggcttggaatgggccaagcatagccgtctgaagcgtgaaggtggtaaggaacccgagtatatgggagaggacaaggaaccgttggtattgtttactaaaaattaccttaaagaccatccggatatcaattattttatttatggtcatcgccacattatgctagacttgatgctgagccgtacttcacgtatgttgattcttggtgactggatacaagatttttcgtatgctgtatttgatggtgaaaatatgttccttgagcagtatgttgagggagaaagtcaatattcctaaaaaaaggctactatgcatcacgcgtagcagccttctataatttatatatttaaccaaacaataaaattacttattcagaatagccagagtatcgctggcaatcatcagctcttcatcagttgggataacagctactgtcactttggagtcatcggcagaaataatagcttcttctccacgaaccttgttcttttcaaggtcaatcttcacacccatgaattccaaaccttcacaaacttcagaacggcaattggcttgattttcacctacaccaccagtgaacaggatgatgtctacaccacctagagcggcagcgtatgcaccaatatatttcttgatgcggtagaaatacatcttttcagccaaaatagctttcggatttccggcagcaacagcggcttccagttcgcgcatatcgctggatactcctgaaacgcctaatacaccactcttcttgtttagtaagttggatatgccggttgcatttaatccttccttttccatgatgaaagtaacggcgcctgcatcgatgtcaccactacgagttcccattacaagaccttccaatggggtcagccccatactggtgtctatacatttaccatctttgatagctgaaatggaaccaccgttaccgatgtggcaagtgataattttctttcctttcggatcaacgccaaggaattcgcatacacgttgtgaaacatagcgatgagaagttccatggaagccataacggcgcacaccgtatttttcatacagttcgtatggaatggcatacatatatgcatagtcgggcattgtttgatggaatgccgtatcaaatacacctacttggggaacgttgggcagaatggcagaaacagcattcacacctttcaggttagccgggttatgaagcggagctaaatcgttgcaagcgataaaagcatccagtacttctttattcagcaatacagattcgctgaaacgttctccgccatgtaccatacggtgacctactgcgttgatttcatccaatgacttgattgcgccatattccgggctcaccaatgtattcagaatgaactcgatacctgcggtatgttctgggatgtctttttctaatattttcttttcaccgttaggcaaagtcagtttcaggaaagagcctaccaaaccgattttttctataccgccctgtgccaggacttctttggtagtcatatcaaataatttatatttaatagaagaactaccgcaattaagcactaatattttcatgatgttgttgtttggagaatgattatttgttttctttagcggcaatagcctgattggcagtaatggcaatcatcttataaacatcgtcgatagagcagccgcgtgacaggtcattcaccggacgagcgataccttgcaggatcgggccgatagcggtagcgtgtcccagacgttctactaatttataagaaatattacctacttccagacaaggaacaaccagtacgtttgccttacctgcgatttctgatcccggggctttgcttgcaccgatgtgcggaaccaaagctgcatcagcttgcagttcaccgtcaatcttcaaatcgggagccatttccttagcgattgccaaagcttccaccactttatctaccacttcatgtttggcagaacccttggttgagaaacttaacatagctacgcgaggatcaattccggcaacagctttggcggtctgagcggtacaaactgcaatttgagccagttggttggcatccggtaccggggttacagcaacgtcacccattacaattacaccgttatttccgtattcgggagcatgagtcagcaacagcatggcaccggatacgcaagtgatacccggagtagtcttgataatctgtaaagcgggacgaagtacgttacctgttgtgttgcgtgcgccggccaactgtccgtcggcatcatcagccttgataatgagacatcctagatacagcggatcgacaaccagtttacgggcctcttcgatggtcataccttttttcttgcggagttcacacagcaattgtgcatactcttctttcttcgggtggtctgtgggatcaataatagtggctttaccgatattccctaacccccattgtttagccaggctcatgatttcatcggggtttcccaataaaattaggtcggcaacaccgtctgtcaatatttggttggcagcttttaaagtacgttcttcagttccttccggaagaacaatgcgctgtttgtttgctttcgcgcgctcaacgatttgagaaattaaatccatgataatatattaattatgtacgttctaaagacgagtgttgtttttcacgatgcaaaattagctaattttgcaatatctacattgcaaaatcaatattatttttggtttaaagtatgctaaaagtgtatgttattgaacaccaaacgggatgtttccttaactttgcgcagttttcaataagtatttaataaatttataaggtatgattcgtcagtgcgccatattatttggctgtttggctttgggtgaattgattgtttttttgacgggtatcaagcttccgtccagcattataggaatgctgttgctcaccctttttctcaaattgggttggataaaactgcaatgggtgcaggggctgtccgatttcttggttgctaatctgggctttttcttcgttccgcccggtgtggcactgatgctttattttgatgtcattgaagcacagttttggccgatagtaattgcgacagtggtcagtacggttttggtactggtcgtaacaggatgggttcaccaattagttagaaaatcaaatggaatatttagaaaataagttctttttgctggcattcaccttcggggtgttttttttgtcacgtgtcttgcagaaaaagactggatgggtagtgttaaacccgattctgcttaccattgccgtgttgattctgtttttgaaatttaccggcatcagttatgaaatatataatgaaggaggtcacctgattgaattttggttgaaaccagcggtggtagcgttgggcgtgccactttatttgcagttggagatgataaagaaacagttgcttcctattgtcatttcacagttggcaggttgtttggtgggattggtggccgtggtggtcattgccaaattgctgggagctactccggagattatttgttcattggctcctaaatctgtgactactcctattgctatggaagtttcgaaagccacgggaggaattccgtctttgacggccgccgttgtggtggtagtcggtctgttcggagcggtgttcggtttcaaggtacttcgggtaggtcatgtggggagtcctattgcgcaaggtctttctatgggtacggctactcatgcggtcggtacttctacagcaatggaaatcagtgggaaatatggagcatacgctagtctgggattgactttgaacggaattatgacagcgattttcacaccgacaattcttagattattaggtgtgatttaacaaaaaagctgttatctttgttatatatagaaaatcatcacagattatagaggattgatttgattttcaataggtatggtcattggggtgagcattgcttataaaaagtctatccgcattcagtagtaacagagcattcttacagcagtctgataactattgtcactttgaatgaaatgaagattctgtgatttgtggtgagaaaacaagcaacccatattttatgatagaatttaaagatataactttagcggataaagacttgatacagtcctttaccttaggcagtttgcgtcgtaattgcgacttgtcgtttgccaatctgtgtagttggattttcctgtaccagactaaatatgccgtgatggataattacctgttgctgcgtttctatgcgggagaagaattggcctacatgatgcccgtcggaactggagatgtgaaacctgttcttgaagcattgataaaggatgctgaagagatgggggcaaaattgcgtatgctgggggtatgcgtggggatgaaagcggatatagaggcggtgatgcccggacgtttcacttttacagaagaccgggattactttgattatatctacttgcgtactgacctggcaaccttgaaaggaaagaagtttcaagccaaacgtaatcatatcaacaagttcaagaagcagtatcctgattatgaatacaaaccgttgactccagatctggttcccgaatgtttgaagctggaagaggaatggtgtcgtgccaataactgcgaggaacaattggcattgggggcagaacgtaagtccatgacatatgccttgaaccatatggaggcgttgggtttgacgggtggcgtgcttcatgtcaacgggaagattgccgcttttacatacggtgctcccatcaatcatgaaacatgggatacttgtgttgaaaaggcggatacgggaatagaagggtcgtatgccatgattaactatgaatatgcaaatcatatcgacgaacaatatatatatgtaaaccgcgaggaagaccttggcctggaaggtttgcgcaaagcaaaactttcttatcagcccgttattttactcgagaaatgtatagcagagctcaatgaccacaaaagatgaagtgaaaacattatggaaactctgcttcaatgatagcgatgagtttaccgacttatatttcaagatgagatataaggatgaagtgaacagggtgattcgtgaagacggaaagattatttccgcattgcagatgataccttatcctatgactttttgtggtgaggtgatttctacttcgtatatatcgggtgcttgtacgcatccggattacaggaagcatggagccatgaaacgcctactgaaggaaacgcatcggtgtatgtatgaagatggagttttgctggcttcgttgattcctgcagaggaatggttgttcggttattatgccaggtcgggatatgctccagtttttgggtatgcggttgagcaggtaagggtagacagattacgccctgtgcccagttgccggatagaggtatgcgaatttcccggtgtggaacattatcattattttgattcccgtatgcatgggcgcaggagttgcattcagcatcctaaagaggattttctagttataatggccgatttaagactgggtaatggcaaattgctggttgcccgggaagcggataaaatagtggggatggcatttacggtaatgggggatgatacattatatataaaggaattgctggcagatacggatgcggtgcaggatactttattgtatgaagcggcccatatatataaggtacagcgtatggattattttattccatcgtctgccgatactttgtttttggggatggcaagagttatccgtgcagaggagttgttgaaggttttcgcccataagtatccggcatccgaactttatatacatattgagggggatgaagttattcaggagaataacggctattatacggtacggggtggtatctgctttcgtgagagaataccggaaaaaaaatatcacacttatacgttggatggttttacccggttgttactggaagcggagcatccttatatgagtttgatgctgaattgattttcattactggttgcataggttgaatttctatgtttaagattgataatctgtggagtaaaaatccggataggttattagtcttcttttgtcagaatacgttccagctcttctgcagtcagtctgagatggaattgtcctttataagccacggatatgccacctgtttcttctgaaacgataatggccaatgcatctgtttcctgcgatacgcccatggcagcccgatgccttaatcccaattctttagggatattcaagtcgtgagataccgggagaatacaaccggctgcttctatccgtttatggcggataatcatggctccgtcatgtaatggactgtttttgaagaaaatattttctatcagtcgttggttcacattggcgttgataatttctcctgtacggatgatgtcattcagaggtacacttttttcgatgacaatcagtgcccccaccttccctttgctcatgctcatacaggcaagtacaatcggcataatatccgctttttccgtcttttcctgcttgtttcccgtcaggaagcggaaaaaacgtcccaactgtttatgcgagcccagtgtgacaaggaaccggcgtatatcatcctgaaaaagaataatcagggctaggacacctacactgaccaatttatcgaagatagaccctagcagtttcatttccaaaacctgagatacaatcagccagatacctataaatactaggataccgatgaagatattgatagaacccgaatctttcatcagacggtaagtctgataaagcagataggctaccagcaggatatcgatgaggtcttttatactaaaatcaataaacatctttctagaattaaaaattgaaaattaagaattaaaaggcagcggagtctttcatcttctgtactatcttcacggtttctacagcagcttttacatcgtgcactctgagaatatccgctccttttagtagggaaatggtatccagcactgttgttccgttcaaggcatcatcaggggttccgcctagcagcttgtaaatcattgatttacgtgatataccgaccagtaacggtagttcgaacaggctgaattcttccaaatgattcatcaactggtaattatgttccactgtttttccgaaaccgaaaccagggtccagaataatatcttttactcctaagtcgcgtaatttctgtactttttccgagaaatagagaaagacttctttcaacagattgtcataatgcggattcatttgcatattttgcggcgtgccttgcatatgcataataatataaggtactcccagcctggcaatcatgttgaacatctgcgggtccatttctccggcggcaatgtcattgatgattgccactccgtactcctctacacacatctgggctacatccgcacggaaagtgtccacggacaccacacaaccgggatgatagcgattgatgatttccagtccggtacgcagacggcgcatctcttcctcggggctgatgtgctcggcattgggacgtgaggaataggcacctatatcaatgatggaagctccttcttctattatttgggaggtacggttgataatatctttttccgtttgctgccggctgccggcatagaaagaatcgggtgtcacattcaggattcccattacttgcggatgggagagatccatcagtttcccattaacattaatatatttgacggttttggtttccattgtttacggcttgtcatttaggtcgtacaaaagtacgcacaattcttgagtttttgttatttcatgaactatttttcagttatctttgttgcaacttaatttaaaagcaaagcgaaagatggatatttcagctttatataagtgttttacggaatgcggcaaggtaactaccgacagccgtaactgccccgagggttctatgttcatagctctgaaaggggaaacattcaatggaaatgcatacgcgcttcaggcgctggaaaagggttgccagtatgccgtagtagatgaaaaagaatatgccgccgatgggcatccgcgtatcttgttagtagacgattgcttgaaagcattgcaggaactggctaattatcaccggcataaaatgggtacccgaatcatcggcatcacgggaaccaatgggaagactactaccaaggaattgatagcctcagtgctgcaaaaaagatatgaagtgctttatacacagggtaacttgaataaccatatcggtgttcctctgactttgctgaggctgactcccgagcatgaactggctgtcatcgagatgggagcgaaccatccgggtgaaatcaaggcactgacccgtattgtagaaccggattacggtatgatcactaatgtgggtaaggcgcatttggaaggcttcgggtcttttgaaggggtcatcaagactaaaggtgagttgtatgagcatctgcgttacaatggcaagcatattattttcatagacaaggacaatgagtatctcacagctatctctcagggccttacccgtatttgttatggtatggaaggaggagagggactttatatcagcggcaagctgggcgcttgtgctccgtttctttcgtttgagtgggaacacgagggacagaagttcgaggtgaatacccaccttatcggcagttataacatgaagaatgcattggccgccattacggtgggccggttcttcagtgtaccgtcccggcagatttgtgaggcactggaggcatatgttcctcataataaccgttcgcaattgacagaaaccacggataataaactgatagttgatgcatacaatgcgaatcctaccagtatgatggcggctttggagaatttccggttgatgaatgtcgctcataaaatggttattctgggtgatatgaaagaactgggagaaaccagtcatgaggaacatcagaagattgcggattatctggatgaatgtaaatttgaccgggtacttttggcaggagaggagtttggcaaagtgattccgtcctttgaacattttaaagatgtggttgcattgaaagagtcgttggaaagatataagccgaaaggatattatattctgattaaaggttccaacagtatgaagttgggccagcttcaggaaatattatagttaaccggttggcagtttcattcacagtaggaggatgaatgtgtcaaaagtccaaagtaactattaaatgtgctgtttgcacctgtataggtatattgtcccacctgggtggaactgccatttcacaaaggtggaactacgctctcaccagggtgaaatgcccattccaccctggtggaatttctatatatactgcatggaaacatgaatggcaaaggtcctttggggaatgatccttcatatagtctgcctctatggtaaatataatcatagaatctttcttctttattatttctctgaatttttctttaaaatagatataataatcggttttgaccgttttctgactccttcctgccgaattattatcccgtgttattacagaaatcagttacttttgcaatgttatcaatagaattgctatgaggaacttatttctactaatcgcattatgctgtgtggctttttctgttcgtgcccaacgtctggttgaagtggggaaaggctttagcagtacttcggtaaatactactgtattccgtaataactccattgtgacgcatggaaacacacaatacatttcttattatgacgctgaaggatggctgatgttaggcaaacgccgtctgggcactggggaatggattttgcaccgttcccaatacaaaggacatgtaaaagatgcacataacattatcagtatgatggtggacggcgacggctatcttcatctttcttttgaccaccacggacataaactgaactattgccgcagcattgcccccgatacacttgttttgggagataaagagccgatgataggcaacgaagaagaagatgtgacctatcctgaatttcatttgttggctgatggcggtttgctttttgtatatcgctcgggcgcttccggaagaggaaatatggtaatgaaccgatatgatgtgaaatcccgtaagtgggagcgtgtgcaggatgtccttgtagatggagaaaacgagcggaatgcctattggcagttgtatgtggaccaatcaggaaccatccatctttcctgggtgtggcgtgaaacctggcatgtggaaaccaatcatgatttatgctacgcccgttcttttgacggaggtaaaacctggtataagaccaacggacagaaatatgagcttcctatccgcctgggcaatgccgaatatgcctgccgtattcctcagaatgccgaactgataaaccagaccagtatgagtacggatgccggaggtcatccgtacatcgctacctactggcgcaatcccgatagtgatgttccccaataccgcatcgtttggcatgatggcgtgaactggcacaaccgacaggtttccgaacgcaagacccctttctcactcaaagggggaggaaccaagatgattcccatgtcccgtccccggatggtggtggacaatggagaagtgtactatctgttccgtgaccaggagcgtggaagcaaagtttccatgtactataccaaagacatacagtttggtgaatggcacgtgaaagacctgacggattttgccgtaaatgcgtgggaacccagtcatgacacggagttatggaaaatgaagaagcaacttcatatttatgtacaggatacccgacagggagatggcgagaagcaggtggaaacagaaccgcaaatggtttatgtgttggaattgtaaataatgtgctgatttgccaatgaccatgcggcatatagcgcaagcacattagtacattagtaaattggcaaattgataaattattaatatgatgaacaaattattgaaacaaacccttgtttgtgcaggtaccttgctgctttccatgcaggttgtcgccaaaccttcttccgaagccaaggaagtacgggggattatagacaaggtaaacacttattggcaaacgcataacaagcccgaagtccgttcgttttgggacaatgccgcttaccacaccggaaatatggaggcatactttctgaccggtaatgaaaactaccgtgcatattctgaaacctgggctatacacaatgaatggaagggagccaaggaaaaggataagtctaaatggaaatactcttacggtgagagtgatgaatatgtattgttcggagattatcaggtttgttttcagacatatatcgacctttatactattcttccggacaactataagatagcccgtgcccgcgaagtgatggagtatgagatgagtacacccaatcatgattactggtggtggagcgacggtctgtatatggtaatgcctgtcatgaccaaactgtataaggtgacgggcaatcatctctatttggataaattgtatgaatatattgtatattcggatagtatcatgctcgaccgggaaaccggcctgtattatcgggatgccaaatatgtttatcctaaacacaagacttccagcggaaagaaggacttttgggcacgtggtgacggatgggtgcttgccggactggcgaaggtgctgaaagatcttcccgctgattacgagcatcgttcttttttcgtaaacaagtatgtgaaactggccgaagcagtcgcagctatccagcaaccggaaggctattggacccgtagcatgatggatcccactcatgctcccggaccggaaaccagcggaacggctttctttacttacggcttcctttggggaatcaataatggctatctggatgaggcagtgtataaaccggtgataaataaagcatggaactatttggcaaagactgctttgcagaagaatggcaagattggttacgtacagccgattggtgagaaggctattccgggacaagtagtcgatgctgattctgaagctaatttcggggtaggcgcttttctgttggctgcttgtgaatatgttcgttatctggaagctcctgaaaatcaggaacgtgcctactggtgcaatctgctttataagatggcagctcccgtactgagcaatatggcggaaggtaatctgaaaaagaatatgctggtagaggtgagtcctaattgggatggacgtaacaaaggagtgacttatatggaaaccttcggacgccttatggcaggtgtcgctccctggctgacacttcccgatgatgatacggaggaaggccggatgcgcaagcaacttcgtgaatgggctttgaaaagctatgccaatgcagtagaccctgccaatcccgactatctgttgtggagaggacacggccaagctttggtagatgcggcatacgtggccgaaagctttctgcgtgcttacgaccaactctggatgcctttggatgatactaccaagaaacgttattttgaagaatttacccaattgcgccgggtagatccgccttacaccaactggttgctgttttcttctaccatcgagagtttcctggcaaaggcagggacggaatgtgacgaataccgtatcaattcggctatccgcaaggtggaggaatggtacacgggagatggctggtatgcggacggcccttctttcgctttcgactattatagcagttatgtcttccatcccatgtatctggaaacgttgcagggcatgaaggatgcagggaaatacactcgtattcattataaaaaatattatgaccgcgccttgaaacgtgccaggaaattcagccttgtactggaacgcttgatttctcctgagggtactttcccggtattcggccgttccattccttaccgtttggccactatgcaacccttggcgctgatggcttggtatcagcagttgcccgaaggggtgagcaacggacaggcgcgtgccgcactgacttctgtgatgcaccggatgtatgacaacaccgagaacttcaatgaggcgggcttcctgaccataggttttgcaggccgtcagcccaatgtggcggattggtacaccaataacggcagtctttatatgacatcactggcattccttccgctggggcttcctgccgcacatccgttctggacagatgccgcacaaccttgcacacaagccaaggcatggggcggacagcctttcccgaaagaccatcactggagtgatgatatacgcacttgggatttattctgattgttttcagatgcgaatgacgcagaggtgatacgaagttgttttttatacttatccgtatcatctgcgttgttcgtgtttaaaaaataaaagctttgtgtcatctgtatctgaaaatggcaaaaagatagtagctttgcatccatgaaaacaaaacttctccctattctgagatatatagtacttgcattgcttcttctgtgcattgtactttgccgtttttttcccgtcatggccgaagggtatgctcgtcatatttatccgtggctgtcggcggcgttgtccgctatagcttctgttttccctttttctttagaggaggtgctggtggtcgtaatcattttatggatgattatttatccttttcttaaacgccggaagaagaaaagctggagattcattgtgggcagggaagtggagttgctggcatgggtctatatctggttttatctggggtggggtttgaattatttccgttacgatatttaccggcggatggaggtggaacctgccggttacgatgaacaggcattccgtcgtttccttgcttcctatacagatagtctgaatcagtcctatacggctgaggtgaaaacggatcctgaaaggatgcggcaggagataaaggagatttaccggcaggttccgtctatgtatggtttggctcttccccaggattatcagcatcccaagcaagtgtggttcaatccgctttattcgggtgtgggagtattgggatatatgggacctttttttgcggagtcgcaattgaatgaagaattgcttcctgtacaattgccatttacgtatgcccatgaactgtctcacctgttgggggtaagtaatgaggcggaagcgaattattgggcttacagggtttgtcgctcctcaaagcggccggcggtgcgttatagtgcctatttcggtctgttgccctatgtgctggtcaatgcatcttctgtgttgacggaagaggaatttcgtgaatggattaagacgatccgtcccgaagtggtgaaggattatggatataaacgtatgtattggaatgagcgttatagtaccctgttgggtgaagtgcagaataaaatttataacctgtttttaaagggtaacaacattccttccggtagaaagaattatgcggaagtgatcgggatactgctttctttggaagaaaaatagaaacagaatgttcaggctggacttgaattcgattgtgacagttataacttgatccaagagttctacaacaaacgagctttatattgttgctccactgctaccacttttcatcggcatttcagcaggaagggtggtagcagtggcagcagaaatataaaactctaaagaagaactgctcaggatgattccaagcaatgatcagaatccgccagggagtctactgtttctgtttcacataatccgaaggcgacattccgtattcgtccttgaaacattggcggaaataggccacactgctgaatcctatcatataggctatttctgaaatagtatattgtccggacatcagcagttccactcccttgcgcatttttaccttacggataaattcgttggcggacatatctgtcagtccttttatcttgcggtaaagggtggagtgactcatgcacatcttgtcggcaatgaaagcgatatccatcttttccatttccagattctcttcgattatttgcgtgattttctgcaagaattcattatccagtttgtttaacgaactcacggcactttcctgtttgggctgcgtatcggccagtgccagcagagaggctattttcttacgggtttccaacaggttgttgatgcgactgtgcagcagcttggcactgaacggtttggtaagataggaatctgctccggatgcatatccttcttccttgtcttgtaaagaatctttagccgtcagtaagattacagggatatggctggtgcgcatatcctcttttattcgcttgcaaagttcgataccgtccatgaccggcatcatgatatcactgacaatgatgttgggaattcgtacctgtgccagttcccagccttctttgccatccttggcagtgattacttcatagatatctgtaaaagagctccggatgtattctcgtatgtcggcattgtcctctaccaccagtacaatgggatgattttcggttggtgtatcggtaatggtggtttcctctgcatccatcggcttcttttccatatcatgttgggcatggatagcgttgggatacgtattctcggtgagcaggcgcagcgtgaatgtggttcccgtatccactgcgctttctactttcaggattccttcgtgcaattcgctcaaacctttgaccagagcgagcccgatgcccgaacccgatgcctgatatttgctttttgcctgataatagcgatcgaaaatgtgtggtaacgcttcggcgtcaatgccatgaccggtatcactgacactgatttccgtgtattttatctggttctcttctactgaacggagtgataaggtgatatctccctcggaagtatatttggcagcattgctcatcaggttgtccagtatgatggtgatcatgtccgcgtcatagaagatttccgtatcttctgtttcgatatgaatatgataatttactttgttattgggattcaactctttgtaacgtaatcccacttcctgtaccaattgtcccagatctcccttggctacagataatttacggttctgggtctcggtcttgcggaattccagtatgcggtttatcagattcagcagacgggtggcgctatcatgaatgatgctgattttgttggcgtgtttgggagacagggtggcatcactcaacaggtcttccaatggacctagaatcagcgtgagcggagtacgcagttcatgggtgatgttggtgtagaagcgcaggcgttcttcattcagttcttgtttgttcagactttgcttgcgctccacttccagtgaactctctaagtccagtttacgtttataaaaacggagcaatgcatataatgcgaagataaacaatatgacataacccaatttggcataccaggtaagccaaaggggaggagcaattaccactgtcagttgtgctgcattctcgttccattcctgattgcgaaatcgggttttcactttaaacacatagttgccgtgcggtatgttacggaaggtgacctgattatctccttgggtgctgtaccatgcattctcaagtccttccagcatatatgaaaattctacttgtgaactttgtgtataatccaacacattgaaagatatgttgaaagtgttttgattataaggtagctcaacaattctgttactgattggaaccggtaaccgggtatccctgctttctgtctgtttattatagataaagaattgggtgatggtaacaggggaaacttcgcgtggtgatgatagttcacgcggattgaaataacatgccccgttttgggagccgaaaaacagagtaccgtctggagtgatgcaagtggaaccatccatgaaatcacccataggtataccgtcatgataattataattgtagaatcttttatttttttcatctagacgagaaatgccaccattggtgcttatccatatatagccgtcatggtcttcctgtatggcacgtacctgtgtgttttccaaaccttcctttgcaccgaatgacacaaagacattaggttgacttacatctttaaaaataataataccttcccgggtggcaacaagaatgcgtttgcgagaatcttccatcatataattcacggcattggatggaaatgaatggtctgttgtgaaattataaagctttttatcatcttcatcaaacacacatactcctttgccgaatgttcctacccataatttcccgtttttgtcccgtatgataccgtgtaccataatatcgggtaactgggcgtttaattctttctcgtacgacaattggttattaaaataagaataaattcccgtttgggtacctatccatatcttgccgtttatatcctcactgaaggagcagatatcgaggaattctgagtctttatctcctatgcgggtgatacgtccgtctttgggagtataaagcaatatgccatttttataagtgcctagccacagtcgttcttgtttgtcttggtaaatcacattgatatgtgtttgtgggtgcagccggcattcgtgtaaagagaagtttttggttttctttcctttttcataaattcctaattcaccttctcctcccagccatatttggtgattatctgcccataatccccatacttgtttattattgatcttaccttgtttttcaatagtataggcaatggtgttgaataatggctgtgcataactgataaaatccactccaccgcggtagttgccaatccaaatatttccgaatgaatcttgtatgatgcttcgtgcattgggtccggataatccatggttgtcattcgttaccgtaatattggagaatgtaatcttttctggagatataaatgtattttccctgagattgagaatactcactcctcccatgttggtacatatccatagagtgccgtctttcatttgtttgatatcaagaatctgatctgacaataatgagttttcatttccttctatgtgtttgaatgtgatgaatttttcgctttgcggattgaaaagtgccagaccgttgttggtgcctacccatacattcttattcttgtctatgcatagagcgcgtacttcattatcgggaatgctataaggattattggggtcatgctgataattttttgcagtacggtctttaagggatacaatgcttaatcctctgagatgatggccaatgtacagattgccgttaccgtcttcttttgatacccagttattaccttccagaccttttacattcttagaagaatagggggtaaacagtttggttttccgatcatagtaatcaactccgaaatgataatgtgtgatccataagccgctgtcggcagcaacagataagtctgtgatatcattactgagcatataattgcccgtggcaggaatgcgtgatatggtttctgtttcataatcaaaataacaaagtccatctcgttgtgtgcctatccagactttgttttcataggggtctgcaagtacgacattcagttcgttaccactcaatcctgaattattcttggtatagatgttgaattgacgtccatcaaacctgttaagaccagattcggttgctatccataagtaaccctttttatcttgagtgacactgactacataattgctggacataccgtcttccactcctaggcgtttgataacataaggttgtgcagatgcatggaacagataaataaaacttaataataatgagattgaaaatgaatatgtgtgtttcatataaaggtacttttatgagtacaaatatatagtattttctaaaatatttctgttaatgtacatgacatattcagcatacgacaactaaaaactcgttatgaacgatttttatatccttcttgctcagtttttctctacttgtcttttacgatatttttatatttgtctcgggaaaataaaacagattaaaaattctaatgcttatgaaaacatagacttaggttctttgcaggtttggtccggatgcctttatatacaattcggagttaggaatgagagtttattaccttaattaaatctaattataaaagaaagacgatgaaagaaaattcgtttaaaagaaatcgaaaggctatgatggctttgctgctttgtacaggtttcattgtaactcagccaatcagtgttatggctgaagagattatgatttttgctcaaactgctcagcaacaaaaacaatccgtttcaggagttattaaagatgctacgggggaacctgtaattggtgctagtgtgctagagaaggggactacgaatggtacaattaccgattttgatggtagatttacgttgaatgtaattcctggcactacactaataatctcttatattggttataagacggtagaaatgaaaactgtagcaggacaaccaataaatttaacattgattgaggacagcgaaatgttggaagaagtggtagtggtaggttacggtacaatgcgtaagaaagacttgacaggttcggtagtacaaattaacccttccaagattgctgatcaaaatccgacttctgttcaagatgttttgcgcggtacaccaggattgcaaataggttatgatgcatcggctaaaggtagtgatgcttctattttgctacgtggacagaattctttaggtaccaatgcaagcccaatgattgtattggacggtatggctttttatggtgaactttctgaaattaatcctgatgatattgcacaaattgatgtgttgaaggatgcttcttctgctgctatttatggtgctaaggctgctgccggtgtcattattatcacgacaaagaaaggtaaggagggtaagccggttattaatgtaggtgctaatctttcggtttctagaaaatcagattatcgcgattattttgatgcggctggttatttgaaatttcatcaggactggcgtaaaatgtattatacgtatggacagggtgaggatggtttgtatgactactatcaagcaaaagatggtagtggtaatttgttatatccagctggttattatgatgacccccgtaccttgacagaaggagaacagaaagcatgggcctccaatataggtgtcagtggtattggtcttagtgaaggtgaatccatgcttggtctgtttgcccgtcgtttagaattcaataattctccgatgatgatggaaaattttttgaatggtcgtatggttgattggaatgatgctactttccgcactggtttcaatcaagattataatgcaagtatttcgggagctactgaacgtgtgaattattacttttcattaggttacattaataatgaaggagctgtacagggtaatgaatacaatgctttccgttctaacatgaaaatcaatgcgaagattacagattggttggaggtaggagcgaatgttaatttccaggaccgttcggatggagatattcaagtatctcttggaagtaattattgggataataatatgttgcgtaattctccatatgcttccatgtatgataacaatggtaattatgagcaatatcctatgtctggtttgcctaccaatggtgggtacaattactactttgatcgtcagtattacgatttggaaaaggggtataccgtattaaatactatttttaatgcaaaaattactttgccagcaggtttttcttatcaattcaatattgctcctcgttatcagtggttctatgaccgttattggatgtctgctgatttgcctaatgcatctgctgctgatcgaggtgtgaatcgtggttggtcgaaaaattttgattggaatttgaacaacaccattacatgggacaagatatttggcgagcatcatttcaccgcaaccttagtacaagaggctgaagaacaccgatattggagtgataatgttaatgcacgtaacatcacgccgagtgatgctctaggtttccattatacgcaaggggctaacaagactcagagtggctttagtactaatgatactcattatactgctgcttcctatttggggcgtttattctatagcttcaaggatcgttatatgtttacaggaacattccgtcgtgacggttattccggtttcggttctaataatccttggggtaactttggatctgttgggcttagctgggtattctctgaagaaaactttatgtctgatgctcacgattggatggatatgggtaagttgcgtttgtcttggggaactaatggtaaccgtgaatttggagatgtttactctacgttgtctaatttgtcactggcaggtggaagtatggtatattaccaaaatggtaactcgaacgttgtcaatccactttatatgagtcgtttggctgcacctaatttagaatgggaaaagactaaagcgtggaatatcggtttggatttttcatttttgaatggaagacttactgctaacatggattattatttgaagaaaacaacagacatgataatgagccagcgtttgccgagtttttctggtttcggttccatcatggccaatttgggtgaagtacagaaccaaggctttgaaatcgctttgaattctacaaatattcaaaataggaattttacatggaatacttccgtaggattttctattaataagaataaaattaaccatatctactatgattatgacgagaatggtgtagagaaggatgatacctccaatggttggttcatcggtcaggcaatcggtactatatggtattatgaaaccgatggaatttggcagaatactcctgaagacattgcttctgctgctttggtagggcagaaaccgggtgatccgaaagtggtgaatcactatactgaagatgaccggattttggaagatggtactcgcatacctgtctacaatgataatgataaggtttatcaagggactacagctcctcctgtttactggaatttacgtaacgatttcactttgtggaaggatttgactctttctgtttcattatactcttatatgggacacaagagccgtgctggttattggttgaatcaggagaacggagggtcacaggtaactaacggctttaatgtggcagctcgtaaatattggactcctgataatccgactaatgattattgtcgtttgaatgctgcaggtcccaatacggggctggctaatggtgtagataaagtttacaaccgtagtttcgttcgtttggatgacataactttgggttatactttgccacagaaatggactaggaaatttatgatagaccgcatccgtcttactgcaagttgtaaaaacgtctgcacctttgataattgggaatatggtgatcccgaaactggcggattggctacacgcacttttaactttggtattaatgtaacactctaatttctgaaaaatattatgaaaacaagcaatatgatatttacaaaagcatgtatggtactggctgcgactgctttggtgaacgttagctgtacggatgattttttgaaacaggaccctttatcgttttacaatcccgaaaatacttacacaacagaatctggtttgcaatcagccttggctatgtgtgattatggcttgaaagaaatgctgatggacggaaatggtaacgtgatgcctatggcttccctttatttcatgacagatattggtctgtatgggaaaaccgatgcgggcgatatgcaagacgattttgccaataagataactccgacatccggtatgaaaggtggtggggatgagaatgctatgtcacgtttctgggaccgcacatggaatagtgtgacttttgcaaatactattatctccaatgtaggtaaagtagaagggttggatcccactttgcgcgatgaatatttaggacgtgcttactttcatcgcgcctatgcctactatcacggtgtattattgtttggcgatatacctttaattacgaagctgattgaagtacctaaacaaaactataaatccacgagtaaagaggcaatcttccaaatgttggtgcatgatttggaattcgctgtaaaacatgtgtctccacagaaagagatcggttatataggtactgtcaaccaagaagcatgtaagcaattgcttatcaagtgttatttagttgtaggtgaatatcagaaagctgaacaattagctaccgatttgattaacaatcatggtttggctttaatgaatgctccgtttggaacgaatgtttcttctggtaatccggaaacatggccggtagaacgtaatgtaatttgggatttgcatcgtggagtaaatataactgatgcttctaatacggaaatgattatgcctattttgaattattatgctgaaggtttcatctcctatccgcagatgcgagctatgtgtgtgcattggagtaatggtattatccgtgatcctcataacttaggatctccaacttataattatgcacgtactgctggggaatatgatgcgaaattagattgggtacgcgctatgggacgtggtattggttgtttccgcacttcttatcattataatcagaccatttggaattatgatggtgaaacagattggcaggatatgcgtcataatcgagaaataggtaattggatggaaatgacggatcttaaatacaataatccaaattctgcttattatgggaaaaacatgatgctttatgcaccagaagattattatgatccggaatcaggtgatttgttggtgagaaaaggggatttgctttgttctgatactattcgtagttggttcccgaccccattgtacaaagtatatatacttgatcaaaatgctgaagaaaatatgggggctaatcagtttaatggagcaaccaagggcaatagtgtgtctaatggtaatctatacttgttccgtttggcagaaacttacttacttcgcgctgaggctaagttctaccaaggtaacccgattggcgctgcagaggatgtgaacgtagttcgtcgtcgtgctaatgccaaaaagatgtttactactgtaactatcggtgacattgctgatgaacgtgctcgggaattgtatttggaagaatggagacagcctgaattgactcgtatttcttggtgtcttgctcgcagtggtcagccggatgaatggggagaaacttataatctgtctacttgggataagcagagtggtacggatttgaatggaggaagctactggtataagcgtactacgcgctacaatattttcaatcatgggcctattgtttccaacaaggaattgaattatcaagtagataaacgtaatctgttttggccgattcccaactcggctattactgctaatacaggtgcgcggttgcggcaaaattatggatatgacggctatgatgaagcgattccgatgtttactaattgggaagaatcagtggctgatgaagaattgacaaaataatgatagttttcaacaggcgttgttgatactgataaagcaagtctgattaacttgcgaattagattataggaggattacggcttgaagtgattttaacccgtagtccgtttttatcccttttaagtagaggaatataaaatttcggaattcactatagaaaaatcgttcatgcttaatttttctactactcttgattattttttagccttttttattcttttaaagctttaagtttgcaatgtgaaaaatagataaaacgaactttaaatataatgcttatgaggaataaatctgctcccgattaatattgggaatgtgacaaaattcagcccaaggagtttctaatcacaactctattcggataatattattacctataatctaatttaataagaaaaacgatgaaatcaaactcgttcttaagaaatcgaaaggctttgactgccttattgctttgtacaggtttcgttgcgacccagccgttcagtgtgatggctgaagaaattgtgactgccgtacaaactgtccagcaacagaaacaatccgtttcaggtactattaaagatccggcaggggaaccggttattggtgccagtattttagagaaaggtactaccaatggtacaattactgatttcgatggtaattttacattgaatgtggctccaggagctacattggttatttcttatataggatataagaatcaagaaatgaaagttattccgggaaaatcacttaacattattttgcaagaggatacagaaacgttggaggaagtggtggtagtcggttatggtgtgcagaagaaatcagatgtgaccggttctgttacttcagtagggaaggagcgtctgggaaaacttcctgtgacgaatgtattacaagctgttcaaggtgcggcagcaggtgttactattacacaaacatcttccattccgggcgatgcgccggatgctttggtgcgtggccagaattccatcaatgctaattccgggccatatattgttgtggatggtgtgcctatcagcaagtcgggaggtacattgaatgatatcaatccgaatgatattgaatctatggaaattttgaaggatgcttcggccactgccatttatggtacaaacggtgcgaatggtgttattttgattactactaagcgtggtacttccggcaagccgaccattcgttataacggatatttcggggtggaggatttttctcataaactagatttctgtgatggttcgcaaatcactcaacgttatagagattatgtgtcacagaatcccggagaaaccatgtataatgactatgtgaagaatgcatacgaagcagaaaatcaggccaatggtatagagaacgattggattgacgctgtatcgcaaacaggtatcatccaagaccataacgtaagtatcggcggtggggcggataatgtgaagtattacgtttctgccgactatatgagtcagaaaggtgtgttgaaagggttcaattacaaacgttactccattcgtaccaacattgatatgagtgtgactgattatatgaaggtagggactaattcatatatagtatctcataaccgtgacggtgggcgtgttaactttctgatggctgaggctatgtctccttatgcaaaaatgtatgaagaagacggcagctattgcatcaatccgatgtacagtgaaactttgtttaccaatccgttgatgtggactactactaatcccgaacgccgtcagtggaatattaatataaacggttatgccgaaattgatttcgaaaaattgatttctcctcttaaaggactgacttataaattcaatggcggttatgcatatatgcccaaacgttataataattatgaaggtaagtcggtaaataatcagactggttatgctgaaataaagaatgaagaaacacaaagttataccatagagaatatccttgcttataatcgtgattttggaaagcatcatttggatttgacagctttgtatgccgcttcacgtaagaaatatcaacgttcgcaagctatggccagcaaatttattaatgacgaccagcagtggcataacatgggtagtgcggaaacacctagcgtagcttcatataccgacctttatactactgtttcacaaatgggacgaattaattattcttatgacagccgttacttgtttacatttacagtgcgtcgggacggttcttctgttttcggtgataataacaaatacggtgtattcccttctgtcgctttaggttggaatattgcccgtgaatcatttatggaatcttccagtaattggttgaatacattaaagctgcgtgcgtcttatggtaaagcgggtaacgaggccatcggagtatatcagtcacgtgtgaagatggattcgggcatgttggctttaggcggagcttcgaatgcaggtttatggcccaatgatttgatggggaatgcggatctgacttgggaaaccacaaagagtttcaatgtcggtctggacttcggactttggaataaccgtttgacaggtaatattgatgtctatttctcaaagaccaacgatttgcttctgaaacgtaatttacctaaagtaactggttacaacaccgtgtactccaatatgggtgaaacagctaataaaggtgtggaattgacattgaattctcgtaatattgtttcaggcgactttacatggagttccaatttggtcttttcatggaataagaatgagataaaggacctttatggggacggccagaatgacttgggtaaccgttggttccttggacatccgataggcgtgatttatgattatacaatggttggaatctggcaggaagatgagatagcccgtggcgaccattggaattgggacccgattgcagaagctggtgatgtgaagttggcggatatcagtggccctgacggagtacctgatggcaagattgatgacaatgaccgtaccatcaaagggcagacaacaccgaaatggattggtggtctgacgaatacgttcacttataaggattttacattgagtatctttatccagactacacaaggattgaaaaagaacaattcattgatcggtatggcaggtgatgaaatgggacgtcgtaataccactactgaaataggttattggactccggaaaacaagagtaacgaatggcgttcattgcgtaagaactcaaacaaacatggatatggtttcccttgtgatgccagttatacacgtatcaaagacatcacattaagttatactttcccacagcgcatgattcagaagatgggtatcggtggtttgcagctttatgtgagcggacgtaacctgtttactttcacggattgggtaggttgggatcctgaagctcgtcaggtagctcgtggtaatagttcatgggatagtacaagaggtgaaactgtatatgacagcagtaactacccgatgactaagagttgtgtatttggagttaatttaacattctaaaaacgaagaactatgaaatttagaaatatattattaacaacttttgctgcatcggcatttgttattgggactacatcatgcagcgatagttttctggatgagaaaatgtactctagttatggtccggaagtatcagatgtaaatgcgaaattggtaggtctgcaccgtcaatatgctgctatatggggaatgtccagtcagcagggatttgtaggatgctggcaggtaggtacggatgtaggtgctcccggtgacactcagggggtagaggttcctttttacagatatcaggaattgaatgcagagaatgcaggggtaagtttcctttgggaaaaattatatgagctcattaatagtgcgaatcagattatcgcttcacaagctgaaggcggtgatgcggcggcaacagccgaagccatgttctttcgtgcttatgcatacaatatgttggtgacattatggggagatgtacctttggtgacagaatctactagtattccgcgtacagattatacccgtaatgcggttgccgaggtggatggagtcattgattctgacttggtttatgccatgtctaatcttccggtagtgggagctgccaaaaatgaaagccgtataaatcaggatatggcaagacagttggcaggagaagcctatcttcggatgggtatgcgtgatgcttcctatttcaagaaggcggaagatgcggtgacgcctattataacaggtggtaaatatgaactgatttcagcaagatatggtaaatatgcggccgagccgggtgattattatcatgatatgttccgttgggggaatcagcgtcgttcacaggggaatatggaggctatctggactttcgaaatggagtataaccgtgatgtgaatggcggtacgattgacaatccgcaacaacgtcgtaactgggttcctgctttccataaactggatggtatggtgaatgcggattccataggcggtcgtggtaatggccgtttgcgtatcagcaattttgtgaaatacggattgtatgagaaaggtgatatccgtaattctaattataatatccgtcgtgtaatgtggtataacaagcccggtttttcaaaagaagttggtattgatgctaaagggttcttggtggataaagacaaaggtgtaagaaatgtgacattaaaaacgggcgaccaggtcatccctcacgagggagattcattgaacgtattttatcctcatcccactaaatggggggcttatgatgaaaccgatgattttggttatgctgtagtgaaggactggcctgtgatgcgtttgggagaaacttacttgcttcgtgcagaggctcgtttccgtcaggggaatacacagggggcggctgatgacatcaatgtgttgcgcgaccgtgcctttaaagactatcgtgcggtggctccgggtgctggtaaagtaacggctgatcagattgacattgacttcattttggatgaacgtgcccgtgaattgattagtgaggagaatcgtcgtatgactttagttcggaccaatacgttggccgaacgtatcaaactgaatggggatgtggaacctgctgcaccaagcaataaggtgattacaggttttgatgccaatatccatacactgcttccgatacctctcaccgagattcaattgaacaaagatggaaatttgaaacagaatccaggttattgattctgtcggatataagtaagatatatataaaatattgaaagagcatgaagggcatatctctcaaagagaatgccctcattttatttcctccagtttgggaaattcgacgtgatttatttctttagaaagaataaaaagcgacttttggctgatttctgtcccattttgcacgaattatacccccttttttattagcagaatatgtatttttgaagaacctcaaatccgcaactacgcgcctaatatgatacagaagcgaaaagaatctgcatcgttagtaaaaagggggcacagtgcatcgaatgtcaccataaagacatataaatgccccttaccccaccatgcgacttgaggcaatacgcaaaatcacgactataagttgtcggtgttatccaaagtcattctggaacacattggcataagcattgttgcatgaatagatattcagcacatacttccttgatgtcctgacccatttggctggcacagagatgaacttaaagacaaacgtcttgatgcggcttgttgctttgagtccgaacctcttcacgtcaagcctcgccatgatgaatttatagaagttgcgtatgagtgccataagcagaagaaacaccgtgttttctcccataaaggattttggaagcctgttccagccgaatccgttattcatatcatcgaagatgcgttccttccctccacggaggttatagaattcgacaatctctttctcggaagactcgtagtcatttgtaaggatgcagcggtaggtgtattctccttcccacaggtcgagttcgccgtctatccgcttctgtctttgaatcacaagacggtatgccttccctttccatttctcgatgagaatggaggccagctcaaactcaatgccgcccaattccactttcttccaacctctgagggcaaagatgtcattgtagagcgaactgcatcggttagcacggatatagaaggtcttgcagtgtttagcaatctcttccactatctcttcagaacacgagccgcaatcagctctgaaacggttgataataagcttgttttgttcaaacctttcaaagaacctcttcagcgtgtccttctggtggaaacggacatttgtgttgccgtcgctgttctcaatgccgacaatcaagttgccaataaccgccacgccagggcgataaccaaggaacttcttgtatgtaggcttcgcatcaaacttctcagcctctatgaactggtggtcgaagtcaacgtcatacccctcgccctctttcagctgccctgtggacaataggcaattgaggagcagtgtattcagcttgtctgccgtgttgaagtcgtaggtcttgccagtgtcggatgtgtaggaaatgttatcctgggtcagttcctttatggctctaagaatcgtgtcggcactgcatgtgcgaagtgtcggatgaagcgaaaggtggtacatcagatgagtggtgacatcctcgatgcatgagccgccacaaaaataaacgctcataagcgaacggatgatttcgctgtattgataaccatacagcctgcatctcataccgagggttgagtcgattacagatgagagtctggagtcaaattgctccattattgaaaatattcctccaaaaggagtgagtttctcggatttaattgctacctttgccatgtctgtcgggtttgatacatattttgatttgcaacactaagataggtgaaaaatctgacatggcaaattcctgagcaactttttgttgctcaggtacttaaaaagttatatttgtaatagtgttgcggaattaaggaagaataaaaaacagctgtatcgggttgggactcgatgacaggtaatgaataaccccataaaatactatgatgcgacttttattatcccttttattgcttttgtcattcttgcagatgaatgcacagacttatcctaaagtgattcttccgggtgattatcctgacccttccattatgcgtgacggcaaggattactacatgactcattctcctttctattacgctcccggattcttaatctggcactcgcaggatttaatgaactgggagccgttatgtcgtgtcatgcctcaatatgaaggttctgccatggcgcctgatttgttgaaatacaaggatacttattacatctattatcctgccgcaggaaccaattgggtgatgtgggcgaaaaacatccgtggtccgtggagccgccccgttgacttgaaggtgggagggattgaccccggtcatgtggtggataaggagggtaaccgctatctttatttggataaaggggaaatgatccgattgacagaggacggacttgccaccgtcggggaaaagaagaaagtatatgacggatggaaatatcctgaccattgggatacggaatgtatgtgtctggagtccccgaaactgaatgaacacaacggatattattatcttacttccgcccaaggagggactgcgggacccgcaacgagccacatggttgtgtccgcccgttcaaaaagtgtgaccggcccctgggagaattcaccttacaatcccattgtgcatacatatagtgtaacggatagttggtggtctaaaggccacggcacgttgatagatgatgtgaacggcaactggtggatcgtttatcatgcgtatgccaatgactatcacacgttgggacgctccaccctgattgaaccggtagaatggacggaggacggctggtaccgtaccgtatctgccgctacccctgtcactccggagcaggaaatcaaacatggattggaactgtccgatgatttcaaaggtcctcaattgggacttcagtggactttctggaaagaatatgctcctcaatccctgactttcaaggaggatatcttatggatgaaagccaaaggccggactcctgctgacggacgggtgttgctgaccaccgctgaagacaagaattacgaaacacaagtggaaatccggacagggaatggaaatgtggccgggcttatcctgtattataatgaaaaggcttacgccggagtcgtttccgatggaaagacattctatatttaccgggatgcggagcacaagacggaacttcccaaccgcattgggaaacatttctttgccagactgcacaattgcggtaaccgtctgtccgtagaggtgagtaaggatgggaaagaatggactcttctaactggtgatatggatgtttcctccttgcatcacaataattatggcggtttttatgctttgcgtgtcggtctgttttctgccggaaaaggaagtgcgggtttcagccgcttccgttatcggaatgcggttccgcaagagaaagatatgagcgcctatctgatggtcttccacaaagacgaggaccatggacttcacatggcaatcagtcccgacggctacacttttaccgctttgaacgaaggaaagcccgtcatagccggagatacgatagccgaacagaaaggtatccgcgatccgcatatcttccgcggtccggatggagcattctatctgtcgatgaccgatttgcatatttatgcgcagcgtgacggatatcgtgatacagagtgggaacgcgacggaaaagagtacggatggggtaacaaccgggggctggtattgatgaaatcctgggatctgattcactggaagcgtaccaatctgcgctttgacaagttgtctgccgtttttagtgagattggttgtgcctgggctcccgaagtgacctatgatgataaaaaaggaaagctgatgatgtacttcaccatgcgcttcaagaatgaggcgaacaagctttactatgtatatgtcaatgacgactttgacaggttggagactttaccccagcttctgtttcaataccccgacgagaagatctctgctattgatgcggatattacccgtataggagataagtatcacatgttttacgtttcacacgacgggggagccggtatcaagcaggctgtttcggacagggtaaacagtgattacgagtataatgcccgttggtatgatcctgaacccacggcgtgcgaagctccgaacttgtggaaacgcatcggtgaggatagatgggtgttgatgtatgatgtgtacgggcagaaggttcataatttcggattcagtgaaacttccgacttcgtacatttcactcctttgggacagtttaaccaaggagtgatgaggactactaacttcacttctcccaaacatggggcaatcattcatcttactcgccaggaagcggaacgcctggcagaacattgggggatgtcttacgatgctttgcttccatctgaataagaaacattttatataaaaataatttatgatgagtaaactgagaaacagcttgtgtgagttgtgcacagctttgattttcctttgcggatgcagcaatgaaccgttgcaacccattcgttcaggcgagatgtggcctgataacaacggagagcatatcaatgcccatgggggcggagtaatgtactatgacggaacatactactggttcggcgagaataaatgtgatactaccagcagtgccatggtgggagtaatgtgttattcttctcggaatcttactgactggaagaacgaaggcgtagcgctttctgttgttgataacgacagcagcgacatagcgcgtggatgtatattggaacgtcctaaagtgatatataatgcgaaaacagggaagtttgtgatgtggttccatctggaattgaaaggaaaaggttatgcagccgcccgtgccggggtggcagtcagtgatactcctgccggtccttaccgtttcatccgttcgggacgtgtcaatgctggtaagctgcctgttaatatggacgggcaggctgttgcagtgctggatactctgaatgccaagaattatgagaaatggtggactcccgaatggacggatgctgtgaacaaaggcttgatagtaaagcgtgatttggatggcggacagatgtctcgcgatatgaccctttatgtagatgaggatggtaaagcctaccatatttactcttctgaagaaaaccttacacttcaaatagcggaattgagtgatgactatctttcacacacagggaattatgtgcgtgtggctccggcaggacacaatgaggcacctgctatcttcaaaaaagacggaacctactggatgatcacttccggttgtaccggttgggctcccaatgaggcccgtatgttctcgtcttcttccatcttcggaccatggtctcagcatcccaacccttgtgtgggaccgaagtcggaacttacgttcggtggacagagcacttatattctgaaggtggaggggaagaaagatgcttttatatttatggcagatatctggcgtccggagcatcccagtgatgcccgttacatttggttacctgttcaatttaaggaaggagttccatacgtggagtggatggacaactggacactggatttctttcagtaatccctgttgaaaatagtcctgaaggatggaaaatagtgcaatagtctgttcttgaccgattattgcatccatcttgctcgattttacctctatggttgtcaattagattttttatctttgctatcggtaaaaagagataataggtattaaagatagggttttaggaagaaggttaacatactgtgatgtgataatagaattttaggttaggttaagttagaattgaaggcatatttcgtgaggaaatgtgcctttctgttttcatagcccttctaggttcgtatatttgtaatgttgaatttgtgaaacttaaaatagaatatgcatgaaaaagattggattgtttttattgttaggtgtttctctttcatggttggtgtctgcttgccaaggacgtcagcaggaagtgcggaaggaagtgcctttggattctattgtgctgagtgacccttgcattctagcagacaggaagacggctatgtattatatgactggaaccggaggtatgctttggaaaagcaaggatttgaaactttgggaaggaccgttccatgtggcaaagactgactctaactcatggatgggacctgatcccatggtctgggccgctgagttgcatccatataaaggcaagtattattattttgccactttcaccaatcaggcggtgaagattgatacggtacaagggaatgtaatagagcgtcgtgccagccatgttttggtaagcgataagccggacggaccttacgttccgatgaaggactctacttatttgcctgctgataaaccgaccttggacggaactttttgggtggataaagacggaaagccttatatggtatattgttatgaatggttgcaaaccttggatggtacgatagagaaaatagaactgaagcctgacttaagtggaaccataggcgaagggaaattactgttccgtgccagcgaatcgccgtggagccgtgaaaaagatgcggatggcaaggataaaccgaataaagtcactgacggtccgtatctgttccgtacaggaacaggtagactcggtatgatttggactagttggatttataatgtgtacactcagggagtggcttattctgaaagcggaaccttggatggaccatggatacaggagaaagacccgattactcctcccgatttcggtcatgggatgttgtttcagaccttggacggtaaatggttgatgtctgtacatcgtcataaggatgtaaacggacgttatattcgtattcctcgcttgtttgaagtcgatttttccggagataaattgatggtgggaaaaccatatattccttgaaagtgctttatcttttttcgagaggaaaggtaattacttttgccttcaatgaaaagagatgtgtagaaagagttggagggacagctttatgagcctgtccctccaaataaatggccgggttaatcccaacccggattctgtttcagtgcaccctgagctaggtctacctcttccaaggggatagcccacagatagtcacggttggcattgaatttgcgggtttcaataaaaatgctttctccttttgcatttatcccgtatactggtttagtaacatccttttcggttgttttatagctacgggtatcaaacaggtgcattccctcgaaagcaaattccaaacgacgttccaaacggatagcttcgcgcatttggtctttggacaagccggagggcagaggaggaagacctacgctgggacgctgacggatttgattgaccgcatcatatacttccgtatccggagcagacagattttcgttacgagcctcggcgaaagttagcagcacttctgcatagcggatatagataaagttggtccagtcgtaattattgataccgtcattgtccggattgatatactttttcatgctatatcctgtacgggtatggctgccatctcccatattgttcaggttgaaagtctttcctgctatttgcgaaccgttccacagtacggagaagcctagacgggggtcacggtcggcaaaagggtcttccggattatagaaaggagactctctgattgatttgccatccttacatggataggagtctatcaagtcttgagtaggtgataaagcttcccaccctcccatcatgacgggagcgaagaactgtcctatataactgccttcattggagtttttcgggttttccagatattcgcgatcaaagatgatttcattacataactctgctacaggttggaacaagtcaccatagttatcatacagtccatacacattcatgcccattactttgcgtgcggcggcttccgccacatcatatttgtgtgcgtagaaagcaactctggctttcagtgcgtagcaggctccggcactcggttttccgtggtcactgttgctgcggatatcgggcaagctggctgctgctttatccaataatcctactatatgattataagtctcctcttcagaactgcgtgaaggaagtttctcgttcagttccaacggatgatccagcagggaggcgccacccatatattttaatatgttagcgtatgagaaagcttcgagaaactgtacttcggctgtcagttgcgctttttctttttcatccatcggcacatcgcctatatgctcgtaaaataccaggcatctgcggatgcattgataggcatttttccataattgtaggaaatgtggattgctggaagtagccgtaccagcagacaactgcccctgttcggctgtgacatgtaccggaatagcattgtcggtgtagcaatctgtcatgatagtatggttctccggttctatcagatacagatagattccggttgcgaatttctgggcatcttctgcgtttttccagaaagatgcgtcggataattggtcttttggatttctgtccagaaaactgtcattgcaagagctcagaccaaggccacatgccaatattaatcctataaagttatattttagtctcatagttgtcagtgtttagaatgttacattcagaccgaatgaataatttcgggtcaatggataatagttgccgctgatggcttcggggtctacaccgtcgaagccggaaatcataaagagattgtcgatactgcaatacactctcagacggctgattccgtatttggatatcagctgtttgggcaggctgtaacctacttgcaggtttctcagcttggcataagaggcatcctgcatccagaaactggaagtcacgcggtttttggagtcactcatggacaatcggggataagtggcattcgggttttccggagtccaacggtccagatgctgttccgttactttaccgccattgtagaaggcgtatctgatttcggctacaggagcgctctttacatcagccgcaccttgcagcagtgcacttaggtcgaaatctttatattgaactgaaagattcagaccgaagttgattttcggaaagtaggaacccaatacttgccggtctttgctgtctaccactttgtccccgttcaggtcacggtattttaagtcacccggaaccggagtacccatgctctgtgtaggatgattcttgatctcttcttcgttttggaagatgccgtcgcatacgtagccgtaatatgcccacagtggatcgcctacagattgtcctggtgtgtcaccgcctttcaaatctataattttggtagttacataactgaaattggctccgatagaatagctccaatcattgatacggttgttatgtcctagttgcagttcgataccagtattgcgcactacgccggcgttttgcatcggagcactgactcccatcatgttgggaacgggaagttgcagtaatatgtcccgtgtttccttgcggaaccagtctgcgcccaaggtcagtttattactccaaaaagcggcgtccacacctacgttccattggtctgttttttcccacgtaatgtcttggttggccatcgggctggaaatggagatacctggagtcaaagtgtttccgaaactgtagtcataaccgaatagataggtgttctgatacggataatagttggaactgttgtctgagtttacggtttcctgattacccagcaatccccatgatgcacgtagtttcaaattatccacccaatcaactttgaagaactcttcttctgagattctccatccgatggagaaagagggaaatgcgccgaagcggttgttcttagggaagcgtgaagtaccgtcataacgcaggttggcttccagtagataacggttatcgtatgaataattcacgcgtccgaaaactgagcgaagagcgtattctatttctgtaccgtatgttgtctgtcccgtcacttcgccggcgttgatctggtccagcgaattggagttgggcaggttcttacggtaagcttgcaggtagcgtgtctgtttataaatttgtgaataacccagtaaagctcctacagtgtgtttaccgaaggttttgttatagtccagataagcttgcaggtttagttccatacttttgatatcatactctgtgatggagttggtggttttctttaccggagtgtctgaacctgcttgatagaatgtcatggtattgacgtgggtgggattgtcggtcaggttgaaagtcgaagcggcaatccctctcagtttcagtccgtctataatgtctagttccattcctacgttaccttggaaattgctgtttgtttctttgtaggttcctccttcacgtgcataggctacggagttgtgctcgtttttgaacaaagcatagttgccgttgctcagttggatgggagtaaccggagtttcacggaaagcatagtgcatcaggttactgatacctgctgctggagcagtcatattactgcggtatactgccatatttgtagtcaatttcagacgactgtttatctgagcgtcaatgttggcgcgtacattgaacttgttgtagttggtattgactatcaatccgtctttatcgtgatagttgaatgccagcgagtaagttactttgtctccaccgcctttgatactcaaatgatggttgttgaacaggccgttttcacttagtagtgtacccagccagtcggaattgggataaaagtcgggatcacttccgtctttgaacttttgcaaggctgtttcgtcatacggacctttcaaaccgtcattggtgtaagcttcattcatcagcactgcataattgtaagaatccaaaaaattgggcatacgtgaggcactttgccagcctgcatatccatcgtaagatacaatggcacgtcctttggttccctttttggttgtgataagaataacaccattggcagcacgtacaccataaatggctgaggcggctgcatcttttaatatagagatgttttcaatatcgttggggtccacgctactcatggtagactctactccatctaccacaaccatggcactggcatctccaatggttcctagaccacgtacacgcagtactccggcatcagctcctggctgaccggtattttggataatggtgacacccggcatttgtcctgccagcatgttggtgacattggcactagtgcggttgactagtttatcggatgagatggttgccacagaacctgtcaggtttacttttttttgagtaccgtatcccactactaccacttcatctaaagattcagtatcttctttcaagataatggtgtaactgttgctgttacttacggtaatttgttggtcgttgtaaccgatatacgaaactttcagtttagcccctacggatacattcaacgtgaatttgccatccacatctgtaatggtaccgttggtgcttcccacttgtactacattggcaccgattacaggatctccgtttgcatcttttacgatacccgtaatttgtttaacatgctgttgtacgatggcagttgacagcgaagcccacaaaggcattgggaaagccattccggcaaatagtgtaagacatgcgtaaaaagaggcttttttcagaattacatgtgtctttacacaattttcccttgttttttggtagaattgcatagattaataaggttaaattagtaaatagtttggtttagggattttattccctttctatttcggtcgctgcaaatgtattattttataataatataatgctatcttttcttttctttttttttgttattcttaataaattacaagttatgaaacactcatggtggcgcttttaagagagaatgcatgttattttgtacgttctttataaatggaatatcgcatattgctcaaaaaaacaaataacatgattcagtgggataaagatgttaaatatcagtttcaaggatcatttttcctaatcggtttatgaaaggctcttcctttcccctcctttttcttgttaagtagccattcacaataatttcatctattcacaaatctccttatcacctaagttcaagcggataatgcaacaggagtgagaatgatgacaatgagaagatacgaaaagaataatttttcagaggaacagagaaagaagatttctttcccttttgttcccctgtggaaaagttgtttctttgcatcttccagttccccaacattcagttgcaatatgaaacagctaaccgaagaacaaaggtataacatttccgcttatctgcaaagcggaaagtcaagaaccgagattgccaatcttgtaggagttcatcgtagcactataagtcgtgaattacgtcgtaatagtgataaacgtaatggcatttacaaaccggatctcgctcaggctaagtatatgtccagaatgcgttcacgaaagcacttcgtgaagtttacggacgacttgaaaattcaagtagatatactcataaagaaagatttcagtccagaacaagtgactgggtttatgcgaacaaagggcttggaaacagtttctcatgagacaatctaccagtatatttgggaagataaaaagcatggagataagttgttatacaagcatttaagaagacggggaagaagtcataagaagagaggtgcattgactaatggacgtggttttatcaaaaaccgcgtggacatagacaagcgtcctacgatagtagacaagaaagtacgttttggtgatttggaaattgacacagtcattggaatgaatcacaaaggagcactattaactataaacgacagggtaactggactagtatggataagactacttagcgggaaagatgccagcccgctaactaaagctgccatcgatgccttggaaccttttagagaccaaatacatacaataacggcagataatggaaaagaatttagttttcacgaagaaattgcacgtaaactaaatatttttgtttactttgcaaaaccataccactcgtgggaaagaggagccaatgaaaacagcaatggtttgattaggcaatacttcccgaagggtacggactttagggacataaccaatgaacaggtaatgcgcgttcaaaacatcttaaactcaagaccgagaaaaagattgggttacatgaccccaaaggaaaaatataaattattaactaacaatgaattcgacactgttgcattgtctgtttgaattcaggtcatctttctcatccggatagtcacttttatgtagcaaaacaagtaagtgtacttacttcgtcatttaagtatacttacttgttttatgaaatgcacttactttttgggacttcaatatgagtgaaatttatgccggtatatgttttttatatacttcaaagacaaaacgtatttcatcgtaagaagcatattcgcctaacttttcttttatttccttcactccttgtggcagagaggggagtttctggagatgagctgtaatataatttattttttcttggtcgactaattcttgtagtttgatatctccagtctggacatagtgtaaaaggtggttgctgatggtaccggtagtcaattcccggaattcagcgatttcctttaccttcatcccttctttaaataatctgaaactgacctttttggtgtcttctttattttttttattttcccgggggacaaatacggttcttatttcagggcgttgcagattttgttctttcatataattccggataatttccagaagttccaaaccataattctctacccccttatgtccgaaataagggacagcttccaatgattctgcatcattaggcaatagattgaccattcccaacagagctttttgctggataatgacataggccggcataccggtttcttttgctttagttccacgccattcggtgattttccgataaagttctgggtggagtatgtcgttgggaacttcaattctcttccgttccctggatgcgcgttctctgggggtgcgctcttttctgtcgtgtgccgttgtacctgaggagttttcattatcggttccgcttaaaaggatatatgcttttttacgtagatagtcgctggcgtgaaaaccattatcttctacatattgtagcaaggaaagtttctgtgtcaaagtgtttaagaactcttccaaggtgttgttcgttttctttcttagttctttattgtccgtgggaagattagtcgcttcagccagtttatggaaagggcgtagtttttgttcaaaataggcggctccttttatgatgcgtatttgcaggttgttattcgtattataatcagtagattgtgttaccagacgttcatattgtttgtggaaacgataggatacatccactatttcagtagtgaatatttgtatctgctttttatattctgccagtaactgagggaagagtttgtagaaatgttcgtcaatcagtcgggcttgctcattgaatgaacgggctatcggtgagaaatcgaatagttcgctaacgagattgagaaaataagtttgttgcatggcacagagcaattcttcattgggggtatgtgtttctatatactgattataatcatcgattattgtatcgctgataatggcgttgacggaaagtggggaactgagaaccatcccttccaatgttttgcatcggctcaaggcaacgtatgcctgtccgtgggcgaaagcggagcgagcgtcaataatggcgtgttcaaaagtcagtccttggcttttatgaatagtgatgccccatgccagttttacagggtattgcttgaagactccttcttgttcttcggttatttcttttgtttcttcatttagcacatatttgctgtttgtccattcctcgggttggacaatgattttttcattcttttctttggtgtggacggtaaatccatcctcatctatagaggtgatttcgccaatcataccattataataacgtttttccggtgaggggtcatttttaacgaacatgatttgcgctccttttttcagcatcaatgtttcatctgtaggataagaatattcaggaaaaattccggtgacttctgccttgtaactgaaaaccggttctttgatgagtgaaagctcgtgatcattaatctgttgtgcttggtaattgtgagtggtgagttggatatatcctttttctttggcaggatggaaattgggaatatatctttggttcaattctgcgagtgtctgttcgtcggctttattctctcggactttgttcagtagggaaaggaaatagggatcattttggcggtagacttgttttagctcgatggtggcgtaggtggttttttttaaggcgaggcttccaaagaaataggaggtatcataatagtggttcagcatattccattccgtttctttcactacgggggcaagttgttgcaggtcgcctatcattagcagttgtacgcctccaaaaggtttataccggtcccggtaccggcggagtacagagtcgatggcatctagcagatctgctcttaccatacttatttcatcaataatcagcagatccatgcttcggatgatgttaattttttctttgctgaaccggaaatgtttttgttcggtattgaacgtggtatcggggatgaaaggtgcaaatggcagttggaaaaaggagtggatggtaacgcctcccgcattgatggcagctattccggtgggggcgactatgactgtgcgtttgggagattctttcttcagattgcgtaggaaggttgtttttccggttcctgcttttccggtgaggaagagatgggtgccagtattctctattatttgccaggcacgctgtagttctgggttattcattatttcctaatgttagtatattatttggtaaagttactgcttttatttaaggcggggaaactttggaggaatattttctttgtttggtggattgctatcgttgttggaggcataaaatttgaggcagctttcatttgcttttaaaagtaaaaatgtatatttgtaccattattctccttttatttaatacggtttgataggcaatgagcattgatttgaatgcatttaataaattctttatagactaccagcaacgttttgtccactttgcctgtacctatgtgcatgatgaagctgttgccgaagattttgttgtggaatcaatgatgtactattgggagaacaaagatcgtttgtctgctgatactaatattccggcttatgtcttgaccacgataaagcataagtgtattgactatttgcgccatcaacaagtctatcaggatgcttctgacgaaatagcccgaatctatgcatgggaattgtcgggcagaatcatgactttggaagatttcgagccctatgaggtttttacaaaggaaatacaggagattgttgataggacactggatgctttgcccgaacagactcggaaaatctttgtgatgagccgtaatgaaaataaatcccataaagaaatagcagaactattggatattacaaccaagggagtggaatttcatatatcgaaagctaccaggacgttacgtcttgcattgaaggattatctgccggtatccttactttttttctatttgcattaaaaaaaacagtttttcactagggaatgttctttcccatccgctattactataaatacgtaaaacaaaagtgtttatggataaggatttgttataccgtttttttgaaggtcatgcttctttggaagatatgaaagtggttaaagaatgggccggtgcttctgaggagaatgccgggctgttgcgtagggaacgcaaactgtttaatgctatgattcttgcaggtcattcccgacggactgatatacagagaatgaggaacaggaggaactattttatcagggaattcctgaaaatagcttctgtaatagtgataacggtgagtgtgacggctgtattattttcaataggtaaagataatggaggtatgtatttagcgatgcagaccattaccgtaccggccggccagcgtgttaacctcgatttgcccgatgggtcaaacgtttggctgaatgccggaactacaatgcaatatcctgtttcttttatgacagacaaacgggaggtgatattagatggagaggcttactttgaggtggctcataatgaaaagagtccgtttgtggtacatacaagtacattggatgtagaagtattgggaacaaaattcaatgtggaagcttattcagcacgaaaaatattcgaaacgtctttgatggaaggcagagtaaaggtaaaattacctcacgatgaaaagaattccgtcatcttggcacccaatcagaaaacgactttgatagacggccgattggtggtgagtaaaattgatgattataatgtatatcgttggaaagaggggttatattgtttcagaaataaaccttttgctgatattataaaagacttggagaaatattatgatttgaaaatacagatggataaaaaggaaatagcaaaggttgcattaactgggaaatttaggatttctgatggattggactatgcgctgcgtgtcctgcaaaacgatgtagcctttatttatcaaagaaatcgggataatgacgtcattcatataaagtaagaaatgtattaaccttctaaaatggaaaatcagcctatgaagcaatccttatgaaaaacaactaaagagccgatgggtgtttgcaccacccaccgacccgactaacacaattatttttaataaatcgtattaataaccatttgcaaagatatgaaaaacattcctttgccggatctttattatcttgaaaatccggatttaaaacaattatttagaattatgcgaatatcaatattcttattgttcttctgcctgttcagcctgatggccgaaaatagtcactcacagaatgcgagggtaactatcaatagaagcgatgccccgttggaatctatattgaatgagatagagtctcaaacggactatctttttatatacaaggaagatgtgaacgtaaagatgcgtaaaaccatacaggtgaatggcaaacctgtatccgaggtgctgcctgcattactgatcggctcttccatcggttataaaatggagggaaatcatatcatccttactcgtgatgttgcattggcagcgcagcaacagggggtaacgggagtagtgaccgatgtctcgggcgaaccgctgattggtgttactgtgatgctgaaaggagaaatgcaaggcacggtgacagatataaatggaagattctcgctgttcgctgagcaaggagatgtaatagtggtaagctatataggttatgcttcacaggagataagattggaggatacaaagttacttcgtattatgatgaaagaagatgtggagctgttggatgaagtggtggtaataggttatggttccatttcaaagaaggaactgactagtgcggtttcccacatatcaggtaaggatatgttgcagattgggagtggtaatcctgccatgcagattcagggaaaggtttcaggtcttgcagtagagaactctactccttctgatcctaattcttcacctagtattcaggtacgtggagtatcctcgcgttcagccggattgggtccgctgattgtaattgacggtataccaggcggtagtcttgataatttgaatgaaaatgatattgaatctattgatgtcttgaaagatggggcagcttcggccatttatggaacccgtggatcgaatggggtgattgtagttactaccaaaaaaggtactatggatggtaaaattcatacttcgtattcgggatttgtgaatataactatacctgtcagagagctgaatgtattgtcggctacagattttagagaacagaaacggggagatgattatggtgctgatactgattggtttgatgaactgactaaagtggctgtatctcatagtcatactttgcaggttatgggtggtaatgccaagactaattataaagcaacagtggattataaaaatacagaaggtatagacttgcgttcggaaaggcaacaagtaggggcccgtttgtcattaaatcatacaggaaaaagtgacttgtataatgtcattctgaatgtggctccgcgcacagtgaagtatcaggatgcagattatgatacttttcgttctgcattgttgataaatcccactactccagtgatggatccggaacaaccgggtaaatatactcagataactacttactccaccaataatccggttgaaatcttgaagttggagaaaagtggtggtgagcgtaccaccttaagttgggatggtacgtttaagttgaatttgtttccgctgttgtgtaaagataggaatcattatttaagtacacaaattacattggctcagcagattatagaaaccgattacagttggtttcgtccttcgatttctactatagaagacaaaagtggatttcagggagaagctagccgtaaatatgacaagaataaacaagagtctttggaatggttggtaaattacagttatgacactgataaccaccatgtaaagttcatgggaggatattcttatcaatactttgtaaatgacggattgaatgctgagaataagaactttgcttcagatttgttaggacctgataacttgggtgctggaacttacaatagtgaagtggagggacgcctaggtatggggtcttacaggaatgattccaaattaattgctttcttcggccgtctgagttataatttcagagataaatattttgctacattttctcttcgtcatgaaggctcttccaagtttggtattagtaacaaatggggatcgtttccagccgtttctgctggttggagaatcagtgaggaggattttataaaaaatatccaatggattagtgatttgaaattgagaggtgatttcggagtgacaggtaatcaggaatttgatagttataagtcattggccttgatgcaggcgtatgatttgatttattataatggaacatatattaagggttggggattcaattccaatgctaatcctaatttgaaatgggaaaaaggtaaaaattggaatgtaggaatagacttcagtctgtttaattaccgtttgaatggtggtgtgaattattatagtcggaaacaacaggatttattgggagtttatgatgttgcattgccacctaatggtgctccgcaatcgtttgttaatgtaggtacaatgaaaaatacaggtgttgaaatcgaattagattggaatgcggtaaagagcaaaaattttaattatacaattggttttgtgggctctacttcaaataataaatttgtttcattctcaaatcagttttatgaaggtcctaagtattattggatgagtagttttcctttgtacccaggaaatccgggggtattgcaacgtattgaagaaggagaacgtattggtaatttttatacattccagtatgcgggcttggatgataatggaggttggttgatttactctaaagatggtgaagtgattcctattgataaaggtacggatgaggataaacgggtggtaggtaatggattgcctaagtttacaatgtctgtgactcatactttccgttataaaaatttagatttgaatttgtatttccgaggtaatttgggttatcagatttatgatgtccatgatttgtattatggcttgcaggatgcagctccgaatacgaatgtgctggagtccgcttacaaggaaaatagggaaattactacaggaaaaaatgtgcatagcagttattttgtacataatggtgattttatgaagttggacgtcgctacattggggtatacttggaatataaataataagtgggttgaaaaggcacgtttctatattacaggacgtaatttgtttactatcagcggatatcacagaggactagataaggatgcatattgtgtaaatggtatggaacccggcttaccttacagtaagaacggatattatccgtcttcacgtcaattcttgtttggtatccaacttaacttctaaatttattactttatgaaaacgtttaaattaaaaaatatatttctgggattagggatgttggcgtcagtgggatgtacggatttgtcggaaactacttatgatattgtacctcaggatggattctatcaaaccaaggagaatgttcttcaggcgtttgtacgtcctttcggacacggatattggttgtgttgtagggcgatgtattggtttggcgaactttctgccgaccattatatgactgtgcaaagagaggaacattggtataatggtggtgaatatttccgttatcattaccatacttggactgttgatgattggtatgttaatgcaatttgggaagatacttacagagggatcattcagtgtaatgccagtatttctgatataagtaagctgaatcctgcaaagtttggtttttcacagcaagagtttgatgattttatttctcaaacacgtgttttacgtgcgtggatgtatatgtccatattcgatttagtacataatataccaattgttacggattatccaactacagagttaccggcacaatcagatccaaaagaaacttttgcttttattgaacaagagttattggaatcattgcctgtgttacaaaaaaaagaaagtaataatggaaatggtttaaagcagggacaatggacccagggagcttgtgctgctttattggtaaggttgtatatgaacgccagttggtggattgatgaggacaagacggtcgaagctgaaaaatatagtgaaaaaattatagatggtgaatatggtttctatgatatagataataggtgggatgcgccgtttgattgggataacgataagtctaatgaattattgtttggttatccatcctcgtttggtggtatgcattggctttatgattatgaaatgttttggcaggttgctccgttcctctctccgaaatatttcggttttacagattgggggaattgtaaccccaaatatgcattacagccaggattagatttaaatggaaatgaatattcctttgaaaatggaaagccggtccgtaagtttatgaaatatcctgatgatgtgcgtctgaaaaagtataaaaatttaggaaatagcaaacgtgaaggaatgtttttgtatggcgacctgccttatgaaacagcaaatggaacggaatatgttacttcggacaatggagcctacaagctttacattcgtgatcaagtaggtattttccgcgatacagatcctgctagtttctctcccaatccttctagtggaacccaaactccgaaatcggctatggcttacggagatcagaattcaggttggtgtttgataaaatatcctatctatcgttcggatgatgctggtaaaatagaatcggattatgctttgatccgtttagcggaaatttattattatttggcagaaattcgtttctatcagggtagaaaggcagaagcggaaaaattactgaattatgtacggaagcgttattatccagcaggttcttctagtttgtatcctgagaatgggagtgcattgacagaacaggaattattggatgaatggggacgggaatttttaggagaaggtttacgtagacagactttatgcaggttcgggatttttaattcgggaacttggtgggataaagaaccggattcggataatcatacgatgtggatacctctttcacgtattacattaaatacgaatccaaacttgaagcagaatccaggttatccgtctgttaattaaaaatttgataatctcattttaatctgataacttgtatgtatatctacatcttgttatcggattgttgaataatttttgtatttaaataattagaacattaatagtatgaaaaaaattaaatccttattttgtatcggtctgttactgactgttgcgacgactgtaaatgcacagtctgtgacttggattagtagtaccgaaggcaatgtatggcaaaaatcaaaagtgaagttgcaatcaaaatcagagcaaaatcctgttttgcaggtagatggaacagagaacggtgttgttttcaagaattggggaactactttcaatgaactttgttgggatgctcttggggtattaactcgtactgaacaagatgaaatattgtataatatattttctccgcaaggtgatttacggattacgcgtggacgaatttcgatgggagccaatgattacgctcgttcttggtatagttgtgacgaagtggagggtgactttgaattgagatattttaatattaatcgtgataaacagactattattcctttcatacgtgctgcacaaaaatataatccgaatcttacattttggatatcaccttggtgtcctccaagctggatgaaaataaatggagattatccggttttaagtagtccgtttaatagtttgtcagagaaacagaattatttattatatggtgctacaggcggtcaggttgatgagaatgaaatgaagttgactgatgcccgtgatggagtttttcctcgtcagcttgcgacaacagactttatgattcaggacccgcgttatttgcagacttatgcagattatttttgtcgttttatagatgcttataaggaacaaggaattcctattgatatggtgatgtatcagaatgaagcatatagttatactccttatcctggttgtgcctggactgctgccggtacgattcgttttaataaagaatacttggctcctactttgaaacaaatgcatcctgaggtaaagctttatttaggtacttttaatacgaatcgtcaagatcatgtggaaacaattcttgctgatacggctttatgtaactgtattcgtggtatgggatttcaatgggaaggacgtgaaatacttccttccataagaaaacagcatcccgaatgggaatatatctgttcggaaagcgaatgcggttggggtagttttgattggaaggcggcagaacatacattcgagttgataaatcactatttagggaatggatgttgcgaatataatttttggaattgtattttgaccgataaaggtgaaagtccgtggggatggaaacagaatgcgttgattcgtgtggattcggaaaagcgtacgtttgtttataccccggagtattatgcggtaaagcattatagcaaaatggtggctccgggatccaaaatgttacaatacaagatgaagggggagaataatcaaccagttattatattcctgacccccgaaaatcaatatttggtaatagcagggaattttagtgatgaacaacagaaattgagtgttaagttggctgggaaatatttggaggtaatgttgcaaccccattctttgaatacattttataccaaatgatcacaagcaaaccctcattaaattgatatctactgtatggattggaggaaatccttacagtagattaaaaagatgtaaaacttccatttttcccccatttgaccgaataaagtccctcttttgaaagatttatatacctgaaaataggttcctatactatatctttgcatcaaacaaattcaggactaattatatgaaaaacaaattttttatcaccttatttgcctgtttgctgccttggatggcaggggcgcagcagactattttcaaacaaaacaatgtagccgaaaaagattacatagcttatctctttacctatttcacaggtaaccacatcagcgaggaagccgtatgttatgcggtaagcacggatggatacacttactgggcactgaacgacaacaagtcggtcatcgactccaaaatcatcagctctaccggtggcgtgcgtgacccgcacattctgcgttgcgaggatggaaagactttctatatggtggtgactgatatggtttcggacaacggctgggactccaaccgtgccatggtgttgctgaaatccaccgatttggtgaattggacttcttccatcgtcaatatgcagaagcgttatgccggacaggagaaactgaaacgggtgtgggcaccgcaaactatctttgacccggaagccggaaaatatatggtttattggtcgatgaaatacggtgacggcgcggacgtgatttattatgcctatgccaaccaagatttcaccgacctggaaggtgaaccgaaaccgcttttcatccctgaaaacaagaaatcttgcatagacggtgatatcgtctttaaagacggaatcttccatctgttttataaaaccgaagggcacggaaacgggatcaaggtagcgaccactcgttctcttacttccggtcaatgggaggaacagcccgactataagcagcagaccacggaagcggtggaaggtgcgggaactttcaaactgataggtcaggacaaatacatcctgatgtatgatgtgtatatgaaggggaagtaccagtttaccgaaaccaccgatctgaagaactttaaagtgatagacagtgaggtaaagatgaactttcatccgcgtcacggaaccatcatccccattacccgtgccgagctgaagcgtatcactgacaagtggccttcaaaggaaatggataatatgactatccccaacaatccggtattgcaagggtttcacgccgaccctgaaatattgtattctcatcagactaaaaaatattatatcctcaaatccgcaactacgcgcctaatatgatacagaagcgaaaagaatctgcatcgttagtaaaaagggggcacagtgcatcgaatgtcaccataaagacatataaatgccccttaccccaccatgcgacttgaggcaatacgcaaaatcacgactataagttgtcggtgttatccaaagtcattctggaacacattggcataagcattgttgcatgaatagatattcagcacatacttccttgatgtcctgacccatttggctggcacagagatgaacttaaagacaaacgtcttgatgcggcttgttgctttgagtccgaacctcttcacgtcaagcctcgccatgatgaatttatagaagttgcgtatgagtgccataagcagaagaaacaccgtgttttctcccataaaggattttggaagcctgttccagccgaatccgttattcatatcatcgaagatgcgttccttccctccacggaggttatagaattcgacaatctctttctcggaagactcgtagtcatttgtaaggatgcagcggtaggtgtattctccttcccacaggtcgagttcgccgtctatccgcttctgtctttgaatcacaagacggtatgccttccctttccatttctcgatgagaatggaggccagctcaaactcaatgccgcccaattccactttcttccaacctctgagggcaaagatgtcattgtagagcgaactgcatcggttagcacggatatagaaggtcttgcagtgtttagcaatctcttccactatctcttcagaacacgagccgcaatcagctctgaaacggttgataataagcttgttttgttcaaacctttcaaagaacctcttcagcgtgtccttctggtggaaacggacatttgtgttgccgtcgctgttctcaatgccgacaatcaagttgccaataaccgccacgccagggcgataaccaaggaacttcttgtatgtaggcttcgcatcaaacttctcagcctctatgaactggtggtcgaagtcaacgtcatacccctcgccctctttcagctgccctgtggacaataggcaattgaggagcagtgtattcagcttgtctgccgtgttgaagtcgtaggtcttgccagtgtcggatgtgtaggaaatgttatcctgggtcagttcctttatggctctaagaatcgtgtcggcactgcatgtgcgaagtgtcggatgaagcgaaaggtggtacatcagatgagtggtgacatcctcgatgcatgagccgccacaaaaataaacgctcataagcgaacggatgatttcgctgtattgataaccatacagcctgcatctcataccgagggttgagtcgattacagatgagagtctggagtcaaattgctccattattgaaaatattcctccaaaaggagtgagtttctcggatttaattgctacctttgccatgtctgtcgggtttgatacatattttgatttgcaacactaagataggtgaaaaatctgacatggcaaattcctgagcaactttttgttgctcaggtacttaaaaagttatatttgtaatagtgttgcggaattaaggtatatctattctaccaccgacggacagcccggatggggcgggtggtactttacggtcttttcctcagataatttgaaagactggaaggacgaaggcgtgatgcttgacctgaagtccgaccaggtgacatgggcggatggaaacgcgtgggctccatgtattgaagaaaaaatggtggacggaaagtataaatattttttctatttcagtggtaaccctacagccggaggcggcaagcagatcggggtggcggtagccgattctcccaccggtccgttcaaagacttgggacatcccatcctcaccgaatctcctgtgggccacggacagcagattgatgtagatgtgtttaccgatccggtttcgggaaaatcctatctgtattggggtaatggctatatggcaggcgccgagctgaatgaggatatgctttccatcaaggagaataccctgaccgtattgactccgaaagggggaagcctgaaggattatgctttccgtgaagcggcgtatgtgttctatcgtaacggactttactattttatgtggtctgtggacgataccggttcgcctaactatcatgtggcatacggtacgtcaaaatctccgttgggtcccataaaggtggccaagaagccggtggtgctgattcaggaccctgcaaaggaaatctatgggcctgcccacaatgcggtgctgcaaattccgggtacggatgagtggtacattgtatatcatcgtattaataagaactttatagaccgtgagaagggtcctggcgtgcatcgtgaagtatgtatagaccgtatggaatttaatccggacggaaccatcaggaaggttgttcccacgttataaaagaaacataacaataaagtatataccatgaaaaagaccttattatctctggcaatcgcctcattggcagcaggccaatccgtctgtgctgccgtggaaaaagtatataatgagcccgattcggtctacatcttctcttacgcccatccggaagacgagggacgcagcggactgaaattcgcatggagccccgatggcgacaagtggctgagtgtatccgatggctttgcctatctgaaatgtgacttcggacgttgggggtcggaaaagagaatgattaaacctcttctggaaaaagcggaagacggacgttggtattgccggtggcagctcacccccagcggaaaagtatggggtacttcccattcttccgacttgttgaagtgggctccccaacaatatgtcaatgcggagaagcctgctgcgccccgactggtcactgcccggcagattgtccttgataaagatactttgaacggctatatgcagaaagtaccttatgtggatatagaacagttgattcgttttgccgagcataagaaattccgcgatatacagaataatgagcgtaccgaacaggacgccgttcgttttgccggactgaaaccggtcactgccaccatccgggtggatgccggacgggtaaagcccatcagcgagcatttaataggtattttctttgaggatatcaattatggggccgatggcgggttgtatgcggagctggttcagaaccgtgattttgaatattctgctaaagacggcgcaagagataagaactggaacagcacgtatgcgtggagcatacagggaactaatgcggaactgtctgtcagtgaggacagtcccattcatgctaacaatgcccactatgcagtgttggaggtacaccgcccgggtgctgccctggtgaataacggttttgacggtattgccgtgaaaaaaggtgagaagtatgacttctctgtgttttccaaagtgctggatgatacgaaaggtggaaaagtgcttgtgagactgactaccaaagacggcaaggagattgcgcaggctgctattcgggtttcatctacagagtggaaaaaacaaaaggctgtactgacagcaacggcggatgctgcggatgccgtgttgtccgtttgtccgcagatggctgggaagtatgccttggatatggtttctcttttcccacagaatacatttaaaggcagaaagaacgggctgcgcgccgatttggcacagaccttggccgaccttcatccccgttttgtccgtttccccggcggatgtgtggctcacggagatggtgtggacaatatttatgattggaaaggctctataggagcgttggaggaacgtaagcctctgcgcaatttgtggggctatcatcagacacgtggtttgggatatcatgaatatttcttgttctgcgaggacatgggtgctgaacctgttcccgtggtggcagccggagtgccttgtcagaactcgggaacttgcagccatcactcggtaggcgaactgggttgtggcggtcagcaaggcggaatcccgatggaggaaatgccgcagtacgtgcaggatgtattggacttgatagaatatgcgaatggagatgcgaagaagaccgtatggggaaagaagcgtgcgcaagccggacaccccaagcccttcaacctgaaatacatcggcattggtaacgaggacctgattaccgatatctttgaagaacgtttcactatgattttcaatgcggtgaaggagaaatatcccgaagtgaccgttatcggaaccgtaggtccgttctatgagggcagtgattatgaggaaggatggaaatttgctaccaaaatgggtattccgatggtggacgagcattattacaatactccgggatggtttatcaacaaccaggatttctatgaccgttatgaccgcaacaaggcaaaagtgtatctgggagagtatgcggctcacctgccgggacgccccaacaacatggaaacagcattggctgaggccttgtacctgacttccgtggaacgtaatgctgatgtggtgaccatgacttcatacgctcctctgttggccaaggagggacatacccagtggaatccggatttgatttatttcaataatacggaggtgaaacccaccgtaggttactatgcgcagcagatgtacggacaaaatgcgggcagtgaatacatcgcttcttccgtgactttggataatgcacaagatgcggtgaagaaacgggtaggtgtgtcggtagtccgcgacggaaagacaggagatatgatcgtgaaactggtgaatctgctgccggtagcggtgaatgcgaaagtggagctcccatctttggaaggaatgaacaccactgccgtaaagacggttctggcaggcaagccgaccgacaagcaggttcgtcctgtagccggtacaatggaagtaagcgagaaattcggatatgaattgccggcttattcatttacagtaatccggataaacaagaatgaaaaataacaatagataaataaacatgaagaaattactgactttgttgctggcagtcctgctgctggcgggatgtgccggcaataagtccggaacattcgaagcgggcaagaatacctttctgctgaatgggaaaccgttcgtggtcaaagcggcagaggtgcattatccacgcattccccgtgaatactgggaacatcgtatcgaaatgtgtaaagccttgggcatgaatacgctctgtctatatgtcttttggaatttgcatgaggaaactcccggcaattatgactttacaggcaacaaggatattgcggctttctgtaaattggctcagaagcatggcatgtacgtcattgtgcgtcccggcccgtatgtatgtgcggaatgggaaatgggcggtctgccttggtggctgctgaagaacgacagcgtgcagcttcgcactctcgatcctttctatatgcagcacgtgggagcctttatgcatgaagtgggcaagcaattgcaggatttgcagattacccgtggcggtaacatcatcatggtgcaggtggaaaacgaatatggttcgtatggcacggacaagccctatgtgtctgccatccgtgacacggtacgcgccgcaggcttcaccgaagtgcctttgttccaatgtgactggagttctaatttcctgaataacggtttggatgatttgctttggactgtaaacttcggtacgggagccgatatcgacaagcagtttgccaaactgaaagaagtacgtcctgacgctccactgatgtgcagtgaattctggagtggatggtttgaccactggggacgtaagcacgaaacccgtgacggacaaatcatggtggatggtctgaaagagatgatggacaaaggcatttccttcagtctgtacatgactcacggaggaacgacctttggctggtggggcggtgctaataatccggcttattcggctatgtgcagcagttatgactatgatgctcctatcagcgaagcgggctggaccaccgacaaatatttcgccttgcgcaatatgttgaaggattacatggacgaaggccagacattgcccgaagttcccgaagccttaccggtaatggaagttccggctatcaaattcactcaagtggctccgctgatcaacaaccttcccgaaccgaagcagacagaggagatccggccgatggagaaatttgaccagggttggggaagtattctgtatcgtacccgtctgccggaagatgtgaaagcaggaaccattttgaaaattaccgaacaacatgactggacacagatctttgccgacgggaaactgttggggcgtctggaccgccgtggcggagagcaggagttgacattacctgcattgaaagccggaactcagcttgatttattggtggaagccatgggacgtgtgaactttgacaaatccattcacgaccgtaagggaatcaccgaaaaagtggaactggtgaacggtaagaatgccgaaacgttgaaaggctggactgtttataatcttcccgtagattatgaatttgtatcttcccggaattttcaggatatgaactcgtctgccgcctgtggcatagaaaaaaatgatgaaagtgttccggcctactatcgcgccacttttaccttggataaggtggctgatacattcctgaatatggagtcatggggaaaaggtatggtatgggtgaatggccgtgccatgggacgtttctgggagatcggtcctcagcagactctgttcatgccggggtgctggctgaaaaaaggagtgaacgaaatcattgttcttgacttgaaaggtccgaaagaggcgaccatcgtcggattggacaaacctatcttggatatgcttcgcgtagctgttccagaaacgcatcgtaaacaggggcaaaccattaaactggagaaggaaacaccggtagctgccggtactttcaaaccaggtaacggttggcaggaagtgaaagtacctgctacgaaaggacgttacttctgtctggaaggcttggcttcctttgataataccaatattgctgctattgcggagtttgacgtgttggatgagaaaggacagaaaatctctcgtgaaaactggaagattgtttatgccgacagcgaggagacccgtagcggcaaccgcacagccgataagatctatgacctgcaggaaagtactttctggcagacggtggacaatacagcttatccccatcaggtggtgatagatctcggcaaggaatataacgtgactggttttcgtatcctgccgcgtgcggaacaaggagctccaggcatgattaaagattataaggtatatgtaaaaacaaccggtttcggttattaaaatgaaggtgctacagaagaaaaataaaacacagatgtaaggagaagattccaaaagtaggaaacttgcagatagaacagttatcggatactttagcaaattttaaaaattactagagtatccgatttcttttttataattttgtggcggtctatgattctaatagaaagcacaatgaaatatatattgacctttatactatcttttctctctttcttggtgtgttctcagaacataactattacagatattcctaccattgaccagttgccggtaaatgctattcatcgtgttttcagagacagtgaaggatatatgtggtatggcacggtgaacggattatgtcgtgacgacggctatcatgtaaaggtgtttcgttcggacattgatactccggggctattagaggacaacttggtagaatgtatcgctgaggataagaaaggaaatatatggttcggtacagacaaaggggcatatattcttaataaatcggattacagtgtacatcctatagatccgaagcgtctgaagaatattccagtgatgtatctttatgctaccagtgacggctctatgtggctggggtatcgctctgtattggctaaatatgataccaacgggcagttggttaaagaatatcctatccggaatgaacacggaggagcctccatctccggattttgtgagagtcgcaaccatgaaattattatttctgtgtggaatggtcgggtatatcatctggacaaagaaaaagatgagtttatcccttatcccgataagatgagaagtcgaaatcctacggtgatggttcaggataatgaacaggattatttttggttggctacctggggggatggcgtggtacgtttcgatccttcggccccaggggattccatgtttgtatactttgaaataccggtcaatgcggccggtgaggaggacggactcatcctcagtctggcacaggatgataaactgggatatatctggttgactaccggccacgatttcatggctttgcaaattcaaccggaccggacgttgaagcagttgaaatttccggcaggacttttgcctgtcaaccacatgctggtagaggtcttgaaaggaaaggaatgtttgtgggtatcagcttttgaccgtcctagtttcatcctacatctgatggataatataaccaaagattatgctttgcccgctttggcggacagggtaaaccgcagtccggccataatggctttgtgtgatgatggagatggcatgatgtggatgatgcaggaacgaactggtcttgcactgtatgacttgaaacaggataaagtgaaaatctattcggattttcccgcacttgcttctttgcctttgaataatggacgagagatgacgagagcacgcatcaataacggggtctgggtggcgaaggatttgaatagatgggtctatggcatggctcgtcagggaatggagatgcatctgaaagatgttatcgacttgaacggacaggtggaacagaatgctacagtgacaaaattatatgaagactcgcatggaatcttgtggataggcttgagcaaaggactttgtagctatgatgttcgtcagaaaagagtcaaacgggtttatccggatgtgggtcatgtgatggggatagtcgaaaataaggaaggactgatatggatttgtactcaggacaacggtttgtttcagacaacggcagatgaaaaactgcgttcttttaaattagaaaagaacttctcctgtctgtctatcgctcctgatgggattttgtggttgggaacttgtgacggaggggtctactcttatgacccttcagagaataagttgctttgttataatggggcctgcggcatgaatggtaatcaggtgaaccagatagtggctgatgcatataatcatatttggattgatacgaaccagaaactgatagaatttaatcctcgtaacggttcgttccgcacctatcttaccacggatggttctatcttgttgcatcgctttcttcccactgctgtttgtcaagcaaaagatggcaatatttattggggcggcattccgggtatttgcatggttactccatcaaacgggttggaaagaaaggctagtgcagtgaagaccaagataactgatataaagttgcaaggagaatcattgatattcggagatagaaagagtagcaattccattaaccggatagaattgcatcccgatgatcagaatttggaaattagtttttcttctcttaaccaccgttatgcttcaaagatacgctatgcttatcggttgataggagtggacaaagcgtgggtatatgtggaaggtggaaaaaactcggctttttataatcatctgagtaagggcacttatacttttcaggtgaaagcgacggatgaaaatggtctttggagtaaagaggtaactgaactgactatccgacgccttcctgctttttatgaaacttggtgggcgtatttgttctatgtattgatagtgatgggtgtatccggttatagtctgtatctttatctgaagcgcgtggaccgtaagaataatgaaatgtgggcggacagcaaggagatgattaaaatgcgtatttatttggatagtaaggtgaatttgcctgaacctgagtttgtacaactggacaaacttctattggagaaagcggtaaaagccgtggaagataaccttactgagcctgattttgatgtgacagctctagctgatgccatgaatatgtcccgttctactttgacccgtaaattgaaagccataacaggtcgaactccattggattttatccggaacatcaagatgaagcatgccagacacatgttggaagataaagacaaaagtgtaacagaggttgccgctacgttggggtattttaatcggaagtatttcaccacttgctttaaagaggaatttggaatgactcccagtgagttccagaaatcacaacacgaagaataaacatcttcctgtcctttaattgttgcaaatagggggtacaaatgcgtcaagttatagctagagccatttgtatcccctgttagcatggttcttcacctgtatttctatttcctatttcattcttttgccacaaccttttacggggagaaaaacacatcttcttcattcattcccgcagtaaaggtatgtataactttaaatttaatatagaatgaaacatttgtttttgttgcttactctgttaagcttttcattaacagccttagcccagcaaaaagtgacgggtaaggtgaaggattcttccggcgagcctgtcataggagccagtgttgtcgtaaaaggcaataataccatgggaacgattacggattttgatggaaactttatgttggatgttcctacaaagagtgtattggttatttcttatattggttatgtcactcaggaagttccgacagtagaaaaaaaatcattagagattattttaaaagaggataccaagaccttggacgaagtggtggtgattggttacggtacacagcgtaaaggggatgtaaccagttctgtagctagtgtgaaagccgataactttgtaaaaggagccgtgaaggatgtgggacagctgattcaaggaaaagtagccggtctggctatcacaaatcctaatggtgacccgacgggaagtactcagatacgtcttcgtggtacaaataccattggtggagccaatacagcccccttggtgttgattgatggaattccgggcgaactcggtactgtggctccggaagatgtggagagtgtggatgtgctgaaggacggttctgctgccgctatctatggtacgcgcggtacgaatggtgtgattttgattactaccaaacaggctaaaggagtggatatcaaccaggtggagtataatggttacgtcagtacttctcttattgccaagaaattggatatgttgaatgcggatgagttccgtaccctttatcccgaccaggatcatggggctgatacggactggattgatgagattagccgtacgccgatcagccacgttcacaacttgtcattgatgggtggtaactcaaagactaattatattgccaatttgaactatgcttctcgtcaagggatcatgaaaaaatcagatttcgaaagttttcaaggacgtattgaggtgactcaccgtatgtttgatgataagttgaaattgaaattcggtttgtttggtaagaaaaatcaaatggaatctacaactagtgggggtagcttcagaggttgggtatatggtcaggcaactcgtagaaacccgactgatccggtaagaaatgaggatggtacatggaatgagaatgtgagcaaattcgaatatgagaatccgttggctttgttgtatgaggctgaaggaaatgtaaaaaagactcagttgcgttacaatggaaatattgtttataatcctatcaaagatttgactctttctgccgtattctcttatattcgtgacaatatgaaccgtggctacggcgagactttgagccatatttctgctttgcgtgatggattggcaggttggtcttcggtaggtgcttataccaagatggagaagttgatggaacttactgcacaatataacaaagaaatcggtgcgcataaattcagtgtcttgggtggttatagttacaatgaaacagattttgaagaactttggattgataactatggttttcaggatgattattttggcggatggcataatattggcatcggttctgctttgaaagacggtaaagcgaacatcggctcaaagaaaactcctacaaatttgatcggctttttcggtcgtgccacctattcattcaagaatcgttatttgttgatgggagcccttcgttatgaaggagccagtcagttatggggtactgataatgcatggggacttttcccgtccgtatctgtaggatggagaattaccgaagaagcatttatgaagaatcagaagatttttgatgacttgaaacttcgtgtgggatatggtgtgacaggttcacagcctaaagatccttttctgggtgtggctatgttgaaatacggatcgtatgcttttgtaaatggaaattggatacagaccatcgttccggcatccaacccgaatcctgatttgaaatgggaggaaaagaaagaaactaatattggtttggacttcgtttcatggggtggccgtttgtccggttctattgattattataaccgtgatgtggatggcttgatatacgaatatggagtaccgactcctccgaacttgtataataagacaatggccaatgggggtacaatgagaaatcgtggtgtggaagtgttggtgactgtggttcctgttcagaataaagattttgaatggagcactaccggaacattctctttgaactctaataagctaatcagtttgtctggcagtatctttaagtcggattacgactattttaatacgggtacagtggaatactccggtcaggtagccgattctcacagagtacaggtgggtgaaagtatcggtaatttctatggctttaaagtagtggatgtagacagtgaagggcgttggatctatgaagacaggaatggtgagctggtgaactataaggactttacccatgctcctgaagataaacatgtgattggtaacggtcttcctaaatggtatgcaggatggaacaatactcttcgttataaaaacttcgacttgaatgtgactatgcgtggcgcgtttggcttccagataatcaatggtggacgtatgaattacgagaatgtaaagaacagccgttttgaaaatcgtttgaaatctgtgaatgacttggtgtttggcaagcatacgttgagcccggaagtggaaccggaattcaacagctattatgtagaagatggtgactactggaagattgacaatataaccttgggatatagtttcggtcaggtaggtaaatatataaagtcactccgtatctatggttcggtattgaatgctttgactataaccggatataaaggtattgatccggaagtatcaacagacggcttgactccgggatatgatacacgtgacagatatccgagtgtgcgctcatttactttcggcgttaatgtgaaattttaatgaactaaaaaggaattgaagatgaaaacaaatataaaattatggacaatgggactgatgacagccgcattgttgggaaatacagcttgtactgatttactgcatgagagttatgggcaggtagtgtctgaggattacgtgccgaaaacggaggaagatgtcagttatctggtaaatgccgcttatataccttggcgcgaaacgttattgcaatggaacggagtggttcgtgcacaggaattatgtgcggatcaggatgttcttcccgctcgcgatggtattggatgggtagacggttatatctataaaagatggcatcagcatacttggactaccgaggatgacggtgtacttcaaggatgggaacgcacgtacaatggtgtgaatacctgtaaccgtattttatctcagatagaagaaggtgtgatcagtgtggatggagaaacgaaagaaaagttgattgccgaattgaaagtactgagggcttcctattattatattttgattgatttgtatggtaatgtgcccattgtgacagactttaaagatacttcattaccgcaacagtctactcgcaaagaggtctttgactttattgtgaaagaaataacagagaatatggatttgttgtccgaaacgccgagaggttattattatggacgtttcaataagtgggcggcccatgcattgctggctaaaatatatttgaatgctgaagtctggtcgggtactgctcagtggcagaaatgtatcgacgagtgtgatatcgtgattaattatgccgagaagtccggagaatatgcattggaaaataatcagaaggatgtttttgtaacgcataatgagaattccaaagaaataatctttgcattgccgtttgatgaaatttatgtgacgggatggaatgattttgatttccacatgtacactttagcacctgaaaaccaggaaacctatcagttgactgcacgtccttggggtggtgtgtgtgcagtgcctcagtttattaattcttttgataaggatgacgcacgtttggaggctaactatattcaaggccagcaatatacctattccggtgaaatcttgaagcgtagtattgatggaaagccattgatttatacggtagatgtcccttctattgaccagtcggatgtggatgatggtttccgttggggtaagtttgaatatgccaccggtataacaaaccgcttgagtaatgactggccgttgttacgttatgcggatgtattgatgatgaaagcggagtcattgatgcgtttgggcaaatcgggagcaggtgctttggtgactcaggtacgtgaacgtgcctttaagaatgagcctgaaaaagcgcaagttacagatgcagaattgatgggaggaagtgtatatgattatggccgaagagatagttataaggcagaacatgatggtggagcggatattaaatatggtcgtttccttgatgagttaggttgggagttttgtcaggaaggacgccgccgtcaggatatgattcgttttggaatcttcaccacgaaagcttggttctctcatgataagagtgatgaaaccaaaaatctgtatcctattccaaataaagtattgttgaccaatagcaatctgaaacagaatccgggatattctaaataatcaggttatttcatccggtggaatttactttggattttcacaaaatagttccatcggatgctctttgtttaatcataggttgttcaataggatttttttaaggagtaaaagattgttttcatttattccattaattttgcaaggaaataagactttgaaataaacccctaattatgaatttacttaaaatcattttgtccacttccgcttttgccatagcttcagtagctttgcatgctcagttgcccacaaaagtagaaagttttccggttagggatgtgcggctcaccgccagccctttcaaacatgcagaggatatggatatccgttatttgctgggaatagaccccgatcgtttgttggctccttatttgaaggaggctggcctgttccctaaagcagaaaattatactaattgggaaaatacaggactggacggacatattggcggacattatttgtcggccctttcctatatgtatgccgctacaggcaatcaggagatcaaggttcgtttagattatatgataagtgaactgaaacgttgtcaggatgccgccggtgacggttatctgtgcggagttccaaacgggcgcaaaatgtggaaagaaatagaagaagggaacattcgtgcctccggtttcggactgaacgatcgttgggttcctctttacaatattcataaaatgtatgccggccttcgtgatgcaactcttcagacaggtagtaaggaagcaaaagaaatgttggtgaaactcactgactggatgattcgtctgatatccaaactgagcgatgaacagatacaggatatgttgcgcagcgaacatggaggactgaatgaaacattcgccgatgtagccgctatcaccggcgacaaacgttacttgaaactagctcatcagttctctcatcagactgtgttgcagcctttattgaaacaagaggataaattgaccggcatgcacgccaatacccaaataccgaaagtgataggtttcaaacgtattgccgatttggaaggcaatcgggactggagtgaggctgcccgttatttttgggaaacagtagtagaccatcgcagtatcaccatcggaggtaacagtgtgcgtgagcattttcatccggctgatgatttcagcagtatgctcaccagtgaacaggggcctgaaacttgtaacacttataatatgctccgccttacaaaaatgttgtatgaaacgagtgcggacgctcatttgatggattattacgaacgggcgctttataaccatatcctttccacacaagatcctgtacaaggtggttttgtttatttcaccccgatgcgtgccggtcattatagagtctactcgcaacctcagaccagtttctggtgttgtgtgggatcggggatggaaaatcatgcccgctatggtgaaatgatttatggacacaaggataataatctgtatgtcaatcttttcattccctctaccttgcgttggggagatatccatattgagcaacaaacggctttccccgatgaggaagggacaactcttgctgtttctccggaaaagggagagaaggaattcgcacttcttttccgtgttcccgaatggacgaatccggaagcattacgcttgtctgtcaacggtgaacaacagaaagtaacggtcaaagagggatatgttagcttgaaccgtacttggtcaaaaggtgacaaagtgagattggaactgccgatgcatctgcgtgccattgcattgccggatggttctgccaactattccatcttatacggaccgattgtgctggccgcccaattgggcaagcaaaatcaggatggtatgttcgccgatgacagtcgtggcggacacatagccgccgggccccgtctgcctttacaaacgatgcctgtcatggtgggggataagaatgatattctctctcatctgaagaaagtggaaggcaaaccgttgacatttgcgttgaccggagtctatcccgaacgttatgagggcatgattgtggaaccgtttttccgtttatacgagtgccggtatatggtttattggcccgtcctgtccaaacaggagttgcaggcaaggcaggaacagttagcgaaagaagagaaggaacgtgctgcattggatggtattactaccgacaaggtgatttgtggggaacagcaaccggaaagcgaccatttcatccggatggagaactctcgtacgggggatgatgaaggtgttcattggcgcgagacaaccggttggttcagttatcgtatgaagacgaatggaaaacctgttcataaggtccgtatcctgttccgtcctgagattcgtaaggatgcaaaagtatggataaacgggcaggaagtaggtaaattagctgacaaaccagcttcggatttgtcggttggcatagttgacgtgcctgtatctatgcaatctgatgatcagttggaaataaagattggtagaggaaatgagaaagtgactccgcatatttatgaggtgcggttggtgactgaataaatacatgctttaaagtaataaaaacgatcatgtcttatgggtatgatcgttttttatttctttttataaatgaagtacctgtttgctatctgtctttccgaaaagattctctatttttgcaggaaacaaaccgaacagctaatgaaaattctccatacagcagactggcatctgggccagaccttttatgaatacgaccgccgggaagagcatttccattttctagaatggctgaaacagcagataaaacagcatgaaatagatgtattgctgatagcaggcgatgtattcgacagcccaaatccttcagcagaatctcaacgagtgtattatcgttttttaagagaagtcacatctgagaacccttctttacaaattgtcatcattgccggaaatcatgactcggcagctcgtctggaggcccccaatcctttattggaggatatgaatatcattgttcgtggcacggtgcggcgcaatgcggaaggcgacatagatttgcaacacctcattgttcccctttatacagaaggaaaagtgaccgcttattgtcttgccgttccctatctgcgtcagggtgattacccttcggcagagaattactcaaagggagtccagcagctttatgaacagcttttcaacaaagtgaaagagaaaggaaaacctgttgtcgccatgggacatctgcaagccaccggttccgaaatctcggaagacgaccgctcagaacgtaccgttatcggcggcttagagtgtgtatcccccgatgcttttgatgaggccatcacctacactgcattgggacatctgcatcgttcccaacgcgtgtcccatcgggacaatgtgcgttattccggaactcccatgcctatgtcctttgctgaaaggaacaatacttcaggggtagtcatgataacgatagatgccgagggtaccgacattaataaattagcgttcgagccgttagccggtttggtgagcattccccctcaagcccgtccgttggaagaagtgttgcaggcaattggggaattgcccgatggcgatgccacccttcggtcgccctatctggaaataaagattttgatgaccgaacccgaaccctcttataaatataagatagaggaagccttgaaaggaaaagcagtccggttggcccgcatcgccgctatgcttccgcaaaaaaaggcaagcggcatctccgccacttcctatgaggaattgcagaccatccgtccgctggatatggcactggatgtctttaaacgaaaatatggagggacggagatgcccgataccatgaaacaattgttggaaagtgtgatcaaggaggccggaatatgaaaatagtagcgataagagggaagaatctagcctcattggaaggcgaatttgttattgactttaccgttgagcctttatgttcggcaggtatattcgccattacaggcagtaccggagccggaaagtcaaccttgttggatgccttatgcttggccttgtttgattgtacgccgcgtatgaacaaggcgaaagagaataacgtttctgttatggatgtcgccgacaggggaattgctcaaaacgacagccgttccatccttcgtcggggtacggccgaaggttattcggaagtggactttgtagctttgacaggggaggttttccgctcacgttggacggtacgacgttcgcgtggcaaagtggatggttccttgcaaaaagtggaaatgacattgactaacctcacttcaggagtagaacagcaaggaacaaagacagaattattatctcacatcagtaaattaatcgggctttcttttgaacagtttaaccgttctgtattgctggctcaaggtgactttgccaccttcctgaaggctcgtcagactgacaaagccgaaatcttggaaaagttgaccggaaccgaaatttactcacgtatctctgcttccatctatgaacgcaccaagcgggcggaaggtgaatataaattattgcaagaacgtatcaaaggcattgagttgttgacagaagagcaattacagcaactttcagctgaaaaggaagaattacaagttcgcttgtccgtttcgaagaaaaaagaggaaaccctgtccggcaagttgaaatggctggaagaagaaggacgcttgaatacaggttgcatacaggcggaagaaacactttcggttgtcagaaaagaaatagaagcagcccgtccgcgttatgaactgttgttccgtatagagcaggcgcaggatatccgcgatgtgtatatggaacaacgtaatgcccggcaacagactactgccggacgttcccgattgaacgaaatacaggttgccatacagaaaaatgctgctttgcaaacttccgcgaccgcacagtgggaagctgctcagaaggcgcaaacggaattcaaggcttatctgttacaacaagaaccacaattggataaggctagagcattggatgtgcaattggcagaaaatagaaaacaactggtggaaagccggaaggaagtggctttggcattacaagctaaggataatttgcatcaatctatctgtaggactgaaaaggaaataagtctgttggcagagaagcaaaatattttgcaaacttggtttgagcgatatactgcttattcccaacttattccggctgttgaattgataaccagtttgcttagtaatttggaaatagcaaagacgcagactctgtcgaatcagcagttgctggagaaagtaaggaatgcgaatgaaatggaggaacaacgtttgaaatccgtacaacaagaggccgagcgcctgaaccgtctgttgccggcagaagttctgttgctccgtgcgcagttggaggagggaaaaccttgccctgtttgcggcagtcttcatcatccgatgagggaacagatcaatgtccaatccttgcaggaagaagaactgaaccgtgccaaagaacaggttgctaaggaaatggaacaactgaagaatacgttgaatgcccgtcaactggagatggcccgtctgtccaccttgattgagaattatacagtacaaagtgaagatatcttgaaaaaagttgaaacctgcgtttccattattcctacttggaaggatttattggagcagggaacgttgaaacgttatgtccagcaattcggcaggcaatggaatacccgtctgcaggagcagaccgaaataaaagaggctcttacctcaaaatctgcccaaagggatagtttgaaaaatgaagaggcgaatgctattcgtttgtacgaagagaaaaaacagaaagaagaaaagcaacagactgaactggaagaacgcacttgtctgcgcgcctctctgttgaatggtgaacttaccgaaaaggtcgttgcaaacaatgttaaacgacaaaaggaattggaacaacaacaggaaaaagcaatgaacttgcatcattctctaaccgtacaagcagaatcttacaaagggcagatcgcgcagttggaaaaggaattagtccgtctgattgctgttttgcaacaagacgagttgaaaataaacgagtggctcactcttcaaaaggaaacgtatgccgagttggaacaattgctttccaaagacaaaaactggatactggctgaaaaacaagcattgaatgcattgaaagagaaggaaaccgtttttcaggcagtcctttcagagcgaagacagaaaaaggaggaacatcagcaagctcccttgaaaccggatatcacggagagcagggagtcgctggctgaaacattgacagcctgcaccgccgccaaagaagcggaaaccgggcgcttggcccaaatagaagtgacgatacagaatcatataaaaggtaaagaacgcatagccggcattaagaaggaattggaggagaaaacttccatctacgagaattgggcgaaactgaatgagttgttcggttcccaaacggggactaagtttaaggaaatagctcaaggctatacgctcgatgttcttttactttatgccaacaggcatttgcaggatcttgccccccgttatgaattgcagcgtattccggacacgctggccttgcagattgtggatcttgatatgatgggtgaggtacgtagtgtccattccctttcgggtggggagtctttcttggtatctctcgctttggcattgggcttgtcttccttatcctccaaccggatgaatgtggagtcgctgtttattgacgaaggtttcggatcattggatatggacaccctgcgcattgcgatggatgctttggaacggttgcagatgcaagggcgtaagataggggtgatttcccatgtggcggagatgacggaacgtatccccgcgcaggtgcaggtggtgaagaccggaagcggaagaagcaaggtgcaggtgatgggacaaatataaggattgggctccattacagatgatgagttataaaggcaagttataaggatagaatgtagcaaatgatattctatgtggaaatatctgtcatatttcgtgtatgtgaaaatgctttgtatgatttggttatgaattgtttaaaaaaatgttttcaaacaaaaaactcaaaaaaagttcttgacattgttgtttttttggtaaaatacatgtatgtttggaatgttcatcaaaatggacaaggaattataaacaaaagcgtttagctggttctgtataagtgaaaagtcgaaatttcccggaaagtaccaagaacagccatacgttcagcctgcaatatttagcggggggcgtttcctgtttgtaccaaaggcttcgactcccgcacttatagacgaggttaatgcccttccgcttttaatttagatgggtttgcacatagggcacaagcctggagattatattatgacaaaaataaacacgtgcaaatctcgctcttacctgaaaagtattatcaaacattggaactccactgaaaagaaatttccaatacaaggctgatatatagattcatgtgtctggtctatatgtcataagtatctggttttttcctggaaaccgatattacttcatatataaattcaattcggaactacttataaataagatcatggataagaaatctgtaaaaatcaatgctgaaaaaatatggtatacactgaatgaggtgaagtctgtttcaatatccgaacttgcaaggatacttaacctgagtattgaaagtactgcattggctgtcggttggctggtatgtgaaaataaagttttcataggaagtaaaaacggacagattgaaatctgtagtgaaaatacctataatttctgtttcggttaaattgaaagatatgttgcaatgaataagaacggttcggtataaatactggacaatcagatgaaagctgccccttaccgtttttacaggcattgtacaatagatgaagatggaatcatgacttgtcatgctggaagtggcagtgaactgaatatttctgaggaagtgtttgaattccgtcttagagatatggaatccctgaactggatgatgagaaaggccagactggaaggacgaaaaatcagaccggcctctcttgatgagagatattttgacaacttgctaaattataaaagattccagtattaatggtatgattgctggcgcagaccttttatgcctcgcttttattataatataagaatgaaagcgtgtcctgattgatgaaaaagacaacaaggagggacttgaacagattattttatatatcggtatagtattcaataaaataaaaaagtgacggactatgaaaaaaacattaattggattattgggctcgacagttatatgcgtactgtttcttgcaggttgtattgatgaacattacggggaggatagcaataccattgttaccaatctgaccggctatgcatgggagagaacatttcagatacgtactgagaatggcagggatgcggaagtctgtgaacattatgagttcgggctgaatggtaaggcttcctgtaaatcacggacgacatgtgatggcgaggaagtggaagagcatgtacattatttccggtatgattttatcactcccaataacagatatcttcttctggattactgctactggcagattgacaggatcagttcttcagtattgagcatatatgaaacctctgacaatcctgtgattgtgatggggcagaccagggaatataagagtttctcggctgttccgttggggaatgactgatgcgctatgtttgatgtgtttttaggaacagaggcgttacaggcataagtgagggaaaaatatgatttttgtctccatattgaatcactgtttttacttatgagaatcggaccggtgtttttgatgggattttgtattcagaaattccacatcaaagacaaggatgttttttaaaaagatcaagagcttttaaaaaaagaacaggagctttttcaaaaacaacaggatgttttgatgtttttccactcgtattgtataacatggcaaaacaccttgtttttctttcagaagtttcagtctctccgcaaacgtcctgttcatcggcttttcggctgaaggatatgcacgataaaatccttcagccgaaaaagatctttcagcgtgacagggtaagcgatgtcgtattgtttggttttctatcggtgttcggattcacctttatacatttattgaccacggctgaaagaaagaactacgcagttgaaggatctcagtgcatcaatctgtcagccggaatgccgatgaacaggacgtttgcggagaggctgaaacttctgaaggttttgggggggattctccgggagagggggatttcttttcaaaagatggatacgcatatcaaaaagaacgtaagaagactttgcatacttgccgcaagtttttcggaatcttgtagcaggatttgcagattcttggtataggaatatcttgtttgattttattgttgtctggtaaaaatgccgaagtttcccaaaaacggtctaggcttgcgataaacagattcggttttaatggtaaacaaatatgattgtatctgatacaaaggtagtaatttcctgccaacgggcaaaattttaatataaaaaggggtaattgctttacgccgatcaatagttgtatggaaaaataatatctttacaactttgttcagatttaaggtgttgaacctatatactggtcatactaggagtatgtgagagataatatattcaggtgattgttatcgtccgtgaggtgaaaaatcaaggatttatcaaataaacatgtaacttatttgatatatatattccgataatttcagtatattttgtagaatgtgtctgtgcaaactagacgtagcatctatcgtctgtgaaaagttggatacttattattgaacctgaatccgaatcccagcatcagatagttaggatcatggaaatcctgtaaattatatccgatatgaaggaatgagctgcgcgtaacttctatctttagtgccaatatctggtagaaagattttaaatctccgcctgcatgaatcacatttgtacctaatcctattccaactgtgaagtaaggcattacgtactcggcacgtcccgaaactcctagggctaattgtttgccggcagacggcttgaggaattcgtcaccgtatccgtccggactatatacattcgcactgccgtcataaacaccgtccaatgaaatacctgcacggaacttatatccgaaattatacatcggcgcgaaattaaatccaagtaccggataagcttcaggagaagcaaccatttgtccttcgccaatagttactccttttctgcgccatgaaccgaacaataccaagtcataactgatatgacgggggaatttaggtacgggtgattgatatagaggttttgcaaaacattcttcttttctgttaatattgtagaccaatcctacttttagtccgatggaattgagtcccgcattcgggaattttgtattaccgttagagaaatgcgtcactgccacacctgttgtgaaatcaaatttgggagagagcatccagttgaaatagaagtttgtattcagataggcgtttacttttgaacctatcaccttattatatgggttcaaatcactgtgatatggtttccagccaaatgaagcgccgaagttccattcatagtttaacgacaatcgttggttgaaacgggcgatacgcgctccttgaaataaatagacagtaagcgggttgcccaactgcggcttctcatacatattgtagtaggccacaccgataccttgataggctcctctgtaaatacggtcggtataggtgttcggatgaaattggaatgagtatttcaagtgaagcgacagggaattctctatgggtttccaattcagattttctcctctgaaaaaggaactggtggggaaaatatatccgggacgtgcctcaatgccgatacggtggataaagtgacgtttcaatgacagagaatctacataaagccggtcggggatgttggttttgtctgaaatggaaacttctgttgtgtctatagggattccctctgtataatgattgattttgtcttcagcaaaggtcatgttacttaagaacagtaatgtacccagaagtatcatgaatttccatttttgtattgtgcctttcatatgccgtgtaatgtttttgtgttttttactgatctattgtatggtctgaattttttatttgtggcacaaatataatcatagtatttgaaaaaagaaatttgttagatataaaaaggttttgtataaccttgataaccactatttaaactattttgaggatgaattgtaatatcatcctctaccatcggctccccacatcattttgttgcggagtgtgttgaaaaagatatggctgtttcgttttactacatttattttatagtcggctttgcggatagtgagccggcttccttcacggcaagtttcgctacgtccgtcgatggcaatcaggaaattgtggctgcggctctctatatccaatgtgatttcccagtcgtcgttgatgacaatggggcgtacattcaggctatgtggtgcaaccggagtgatggcgatggtattactgtgtggcacgatgacaggtcccccgatgctcagcgaataggctgtagaaccggtaggagtggcaattaccaatccgtccgcctgataagtggtgagataggccccattgatggctgtgtggatggaaatcatagaagaactgtcacgcttcagtaccgctatctcattcagaccgaaagggtaacctttcagttcttgttctttgcaggatacttgcaatacgctgcggtcttctatccgatagtttccattgtagatatcattaaatgtgtcctccatctcttcaggggagacatcggccagaaaacctaatcgtccggtattgatacctagtatgggaatgttgcgtgaacccacacggctggcagctttcaggaaagtgccgtcgcctccgatacttagtatcatgtcggcttcaaaattatttccatcgaaaacaccggcgtgacggatgcttatcttgaggtcgttcgtcagaaactggtagaactcgcggcagatatggacttcggcgttatgttgtgacagaatggatagcaaacgttccacatgagccgatttcttggcttgataagtgtttccgaaaagggcgaatttcattgggcgtatattcattagttaattttataaatcttttgtttgtcaaaatggaccaggttttaataaaacctgctaactttgcacatcagaactgcaaagataataatatattgccaagatgacaaagttaagtgtaaatataaacaaggtagccaccttgcgtaatgcccggggaggcaacaatccggacgtggtgaaagtagccttggactgtgaggcgtttggtgcggaaggtatcactgtacatcctcgtcccgatgaacggcatatccgccgcagcgatgtgtacgaacttcgtccgttacttaccacagagtttaatattgaagggtatcccgcaccggagttcgttgacctggtactgaaagtgaaacctcatcaagtaacgctggtgcccgatgcgcccgatcaaattacgtctaatgccggatgggataccaaggccaatctttctttccttaccgaactgatggatacgttcggacaggcaggcattcgtacctctatctttgtcggtacggacaaggagatgatagaatatgccgccaaggcgggggccgaccgggtggaactttatacggaaccatacgctacgatgtaccctcagaatcccgaagcggccattgctccttttatagaagcggcgaaggtgacacgtagcctggggatgggactgaatgcaggtcatgaccttagtctggtaaatctgaaatatatgcatacgcatattccttggctggacgaggtatctatcggtcatgcattgataagcgatgcgctttatatgggattaaaacaaactattgaagaatataaaaattgtcttcgttcatgatgaatatcactttattggctgcacaggcggctttggcggatacccttgccgggggtaaccccacattgacacccgtttcgggggaggctcagatgaacctttgggatatggcggtaaaaggcggatggatcatgcttgtgctggctctgctgtccgttgcgtgtttttatatcttttttgaacgtcttgcttacattcgcaaggctggtaaggaagaccctttgtttatggaacgtatccgggattatattcgtaccggagaggtgaaatcggccatcaattattgccgtattactaatacgccttctgcccggatgattgaaaaagggatttcgcgtatgggacgtcccgtcgccgatgtgcaggcagccatagagaatgccggaaacattgaagtggcaaaattggaaaatggcttccccgtcatcgctacggtttcgggtggtgctcccatgcttggctttttaggaacagtgactggtatggtgcgcgctttttgggagatggccaatgccggaaataatattgatattacattgctgtcaggaggtatctacgaggcgatgattactactgtaggtggtcttatagtaggtattgcagccatgtttgcttataattatctggtggtacgtgtggataaggtagttggccagatggaagcccgtaccatggattttatggatctgctgaatgaaccggttcaaaaataaaaatatatggcgttaaaaagaagacaaaaaatatcacccaatttcagtatggcgtctatgacagacctcatattcctgttgctgatatttttcatgattacctctactatggtgtcacccaatgccattaaggtattgcttccgcaaggcaggcagcagacttcggcgaaaccacttacacgggtaattatagacaagaatctgaacttctataccgctttcggtaatgaagatgaaatgccgatagacttggaagaactgcccgcattcctgcaaaggtgtgccgagaaagaacccgatatgtatgtggccctttatgcggatgaggttgtgccttaccgtgaaatagtaagggtactgaacattgctaatgaaaatcatttcaagatggtgttggctacacgtccgcctgagaagaaacgttaagctgtaagcatgaagaaaaataagataacaggactgattggtacggctgtactgcatattcttctcctaatcctgctgttggtgattgctatccgtcgccctcaggctcaggaagaagggggtgtccctgttatgctgggaaatacggaactttctcaaggaaatgccgatccttatacgctgacggatgtggatataatgaatgagcccgaggctccggctcccgatatatccgaacccgaaatggtttctcccgtcgaaacaaaagaggaaatcatcacgcaaacagaagaggaaacggtgacagtccccaaaaaggaacctaaaagagaaattcctaaaaaagaaaagcccaagaaggagactcctaaaaaggacgtaccgaaaaaggagccggtaaagccgaaagagaagactgaggccgagaagcgtgctgaagcagaaaaagcagcggctgagaagaaagcggcagccgaaagagcggcagcggaagcggcggcgaagaagatagccggtgctttcggaaaaggaactcaaatgggaaataaaggaaccggtactacaggcttcggtttggagggtagcccgacgggaaactcttcggaagggaaatccagcggagtgggcggttacggaacatttgacctcaatggacgttctttgggtagtggcggtttgccgatgcctgtctataatgtgcaggatgagggacgggtggtagtgactattaccgtaaatcccgcaggacaggtgataagtactagtatcaacaaacgtaccaatacagtaaacgcttcgttgcggaaggcggcggaagaggctgcccgtaaggcacgctttaaccaagtggacggagtgaataaccagacaggtactattacatattactttaaactgaagtagcttatgaaaacaatttatgtatttttggcagaaggcttcgaggaagtggaggcactgaccccggtagatgtgttgagacgtgcaggtttgcctgtaaagaccgtttctataacaggtgtgctgaccgtaaacggtgcgcatggtgttccggtagtagccgatatggtgtttgaagaagtaaaagaagaggatgcggaaatgattgtattgcccggcggtctgcctggagcgacaaatctggatgctcacgaaggtttgggcaagttaattatgacatttgctgaagcgggacgtccgttgtctgccatctgtgccgctccgttggtatatggaaagcgtggtttgttgaaaggtaagaaagtaacttgctatccgggatttgagaagtatctggaaggtgctgagtatactgccgctttggtagagaaagacagtaattttattactggtaaaggtcccggtgccgctatggcattctcatttgctattgctgggaaatatgtcggtgcggaaaaggtggcagaattgaagcaagggatgatgattgcagaatgaacaggcatgtcattatagttgcgggaggcaaagggttgcgtatggggggagatattcccaaacagtttttgcctgtgggaggcaagcctgtgttgatgcgtaccatagaggctttttacgcttttgattcttctatacatattatattagttcttccggtgagccagcgggcttactggaaagatctttgtgaaacgcatcattttgctttgcgtcatgatattgccgatgggggcgagacccgtttccattctgtaaagaatggattggcatacgtgaggggagaaggcttggtaggtgttcatgatggcgtgcgtccttttgtttcccgggaagtgatagccggatgttatgaggcggcgcagactaagcaagcggtcattcctgtaattgatgtggtggaaaccgtgcgtcatcttacgaagccgggaagtgaaacggttccgcgtaatgactataaactggttcagactcctcaggtctttgaagtgcagttgttgaaagaggcatatcaacaggaatatacggatgcctttactgatgatgcttctgtagtggaggcgatgggcagggaggtctgtctggtacagggaaatagagaaaatattaaattaaccaccccttttgatttgaaaatagcggaagtcttaatttgaaatgttcgatatcactacgcgtgacataaaatatttgcaaggagtaggcccgcagcgtgcaaccgtcttgaacaaggaattaaatctgttttccttgcatgatttgttgtactattttccatataaatatgtagaccgcagccgcctttattatattcatgaaatagacggcaatatgccttatatccagttgaaaggcgaaatcctcagttttgagacttttggtgagggaagacagcgcagacttgtcggtcatttttctgatggtacgggcatcattgatttagtctggtttcaaggaattaaatatctgttagagcactataaaaccaagacagagtatattgtctttggtaaaccaaccgtattcaatggtcgtatcaatgtggctcatcccgatatggatccttcaggcgaacttaccttatctacgatggggttgcagccttattataacacaacggaaaggatgaagcgcggtttcttgaactctcatgggctggagaggttaatgaagaatgcgcttgccctgctacaggaacctcttgctgaaacattgcctcctcagttagtagaggagcatcatttaatgtctttggatgaggccatccgtaatattcatttccccaagaatcccgaattgctgcggaaggcccaatatcgtttgaagtttgaagagctgttctatgtgcagctcaatattctacgttacagtaaagacaggcagcgtaaatatcggggcctgcgttttgaacgggtgggtgagatctttaatactttttattcacagaatcttccttttgaactgaccggagcgcaaaaacgggtgataaaggagataagaaaagatatgggaagcggacggcagatgaaccgtttgctgcaaggtgacgtgggaagtgggaaaacattggtggccttgatgtccatgctcatcgcactggataatggctatcaggcatgtatgatggctcctacagagattcttgccgcccaacattatgaaactattcggaaattcctgtttggcatggatgtgcgcgtggaacttttaatgggatctgtcaaaggaaagaagcgtgagaagatattgagggatttactgacgggggatgttcagattcttataggcacgcatgccgttttggaagatactgtgggcttttcttctttgggaatggtggttatagacgaacaacatcgtttcggggtggctcagcgtgccaagttatggagtaagaatgtttgtccacctcatgtgctggtcatgacggctacccctattccccgtaccttggctatgacactgtatggtgatcttgatgtatcagttattgacgaattgccgccgggccgtaaacccatccagactatccatcagtttgacaatcgtcgcgccagtctttatgcctccattcgcaaacagatagaagaagggcggcaaatctatattgtttatcctttgataaaagagagtgagaaaatggatatcaagaatctggaagaggggtatgaactgatttgtgcggaatttcccgattgccaggtcagcaaggtgcatggtaagatgaaaccggcggagaaagatgccgagatgcagcgttttgtcagtggtgatactcagattatggtagccactacagtgattgaggtcggggtgaatgtccctaacgcctcggtaatggtcattgaaaacgccgaacgtttcggactttcacaattgcatcagttacgtggccgtgtggggcgtggcgccgaccagtcttattgtattctggtcaccacttacaaactgaccgaagaaactcgcaagcggcttgaaataatggtacagaccaatgatggtttcgagatagcggaagccgatttgaagttgcgcggtcccggtgacttagagggaacccagcagagtggtgtcgcttttgacttgaagatagccgatattgcccgtgacggtcaattattgcaatatgtccgtgatgtggcaaatcgtattgtagatgaagaccccacagggactcgtccggaaaatgctattctttggcggcaattgcaagcattgcgtaaaacaaatataaattgggcggctatttcttagtttatgttactacattgttaaaaataaagatatatgttgcataacatatttgcgatgttttctccctgtttatagaggttacagggtattttaccgggattttgtatataacttatataaaaaaagagttaaagaagtaccttgtttctcaaggaaaatctctatctttgggagaatttttgaaaagaagcacagtattaaccttaaatgaaccgaatattatgatggaaaaaacgctggttattttgaaaccttgtactctgcagagggggttggtaggtgagattactaatagatttgaaaggaaaggtctgcgtttagccggaatgaaaatggttcagttaacggatgaagtgcttagcgaacattacgctcatttaagttcaaagccgttctttcagcgcgtgaaagatgcaatgatggtttgtcctgttattgtatgttgctttgaaggtgtggacgcagttcaagtagtgagaacattaaccggtcctactaacggacgtctggcggctcctggaactatccgtggagattacagcatgagctttcaggagaatatagttcatgcttccgattcgccggaaaccgctgaagtggaacttaaacgattttttaaaccagatgagatattcgagtataaacaagctgtgttcggctccctttatgctaatgacgaatattaaaagaaaaaccaaaaaaacggatgattttgaaatgtgttaaagtagtcgcagcggcagccttcgccctagtcagcctgaatgtgtcaggacaggatctgttggcacgccaggcacctatcgaccgaaaattgaaagcagtagattctgttgcattgattcgtcagataaaggcggaaaagtcagcttatcctgcatatagtctctatcctaattggagtaacgagcgtgtacacgcttatggtaatactgttactattcctgatacattccgtattgatatgaccggtttccgtatgccgacagaacacacaaaaataacttctaaatttggtccccgtcgtcgtcgtatgcacaatggattggatataaaagtatatataggtgatacgatccgtgcagctttcagtggaaaggtgcgtatggtgaagtatgaacgtcgcggatatggaaaatatgtagtgattcgtcacgagaatgggttggagactgtctatggtcacttgtcaaagcagattgtggatgagaatcagtatgtagaagcaggagaacctatcggattgggtggaaataccgggcgttctactggatcacatcttcattttgaaacccgtttcttgggacaggccattaatccggcacttttatttgattttgaaaaacaggatattgtagccgattcttatttgtttagaaaaggtaataacagataccagcgtaacacgaatagtaagaacgtgaatttgttggcttcatcagatggtactatccgttaccataaggtaagaagtggagatacattgagccgcattgcacagaaaacaggtacatctattgatgctttatgcaagttgaaccatattacccgtagaactattcttcgtccgggacaagtgttaagatgttcttaagctttagttaattaagaaatacaaaatagggcgggaaagagtattcttttccgcctttttgtttacgcttaagcagaaaaatgcgtaactttgccgtctaatcatagagtgtgatgaaagatacgaaacaacaatttgaacatgtaatagctgtctgccgtgatttgtttgcgaaaaaactgcacgattacggcgcagcatggcgtatcatgcgcccttcatctgttaccgatcagatatttatcaaggcaaaccgcatccgtagtattgaaatcaaaggggtgacgatggtagatgaaggtatccgttcggagtttatcgctattgtgaattatggaataatcggcctgatccaattggagctgggatatgctgatacggatgatatgactgaagaacgtgctttggaattgtatgaccgatatgccaaacaggcattggaactgatgctggccaagaatcatgattatgacgaagcatggcgcagcatgcgtgtcagttcatatactgatttgattttgatgaaaatctatcgtaccaagcagattgaaggtcacgatggagccacattggtatcagagggcattgatgccaactatatggatatgattaattattctgtattcggattgatcaagttggaatttggagagtaaacagttacatagtatcattggaatctggacaaatgcctgccgctttttgctggcggtagtatttatattttccggttttgtcaaagcggtagatccgctgggtacccaatataaaattcaggattatttggaggctttcggttgggctgcttcggtgcctgcctttcttccgtttctggcgtctatattgcaggcaatggttgagttttgtttaggagtatatcttttgtttggtatccgcagaagaatgacaaccttgtttgttgtgcttatcatgggggtgatgactccgctcactttatggttggctctttccaatccgatatcggattgtggatgtttcggcgatgctgtgactttgactaattgggaaacttttgggaagaatgtatttttgttgatagctgcggcttccgtttttaaatggggaaaccgtataactcctttggtgaccaaacgtttcgattggttggtggctatgtatgcgtttctctatatttcggggatgactttgtattgttaccatgaattgcctgtctttgatttccgcccttatcatatcggggcagatatacgtaaagggatggaaattccggaaggagcgaagcctactgtttatgaaactcgttttattcttcaaaaaaatggagtggagaaagaatttacattagaaaattatcccgatagcacatggacttttgtagattcccaaacgatagtgaaggaacaaggatacgaaccgcctattcatgacttttctattattcgtcaagaagatggggaagatataaccgatgaagtactggatgatgataattatacttttctgttggtggcgcatcagctgagccaggcggatgatagtaccattgacctgataaatgaactgtatgattatagtgtggagcatggatatcaattctattgtcttacttcatcacccgatagtgacattgaagactggcaggagcgtacgggagccgagtatcctttttgcctgatggatgacattacactgaaaaccatgatacgctctaatcctggactgatgttgctgaagaacggagtagttataaacaagtggagtgtgaatagtctgcctgatgaatatgtgctgaccgacaggctggaaaaattgcccttggcacaaatcaatgaaaagactttcagtcataaagtggtgctggtattggcatggtttgtcttcccgttgttgtttttcagcatggtggatgtcatttgggagcattttcataggaaaaagaaattgaaagagaatcgaacaaaataatttcattaaccctttaataaaataaacaaaatgagaaaaaacattgttgcaggaaactggaaaatgaacaagaaccttcaggaaggtattgctctggcaaaagaattgaatgaagctttggctgttgacaaacctaattgtgatgtagtaatctgtactccgtttattcacttggcttctgttactcctattgttgacaaagctgtaattggtgtaggtgcagaaaactgtgcagataaagtatcaggtgcatataccggtgaggtttctgctgaaatggttgcttctacaggtgctgaatatgtaatcctgggtcactcagaacgtcgtgcttactatcacgaaacagtagaaattctggaagaaaaagttaaattggctttggctaataatttgaagccgatcttctgcatcggtgaggtattggaagagcgtgaagctaacaaacaaaatgaagtggttgctgctcagttggcatcggtattctctttgtctgctgaagattttagtaagattatcctggcttacgaaccggtttgggctattggtacaggtaagactgctactgctgaacaggctcaggaaatccacgcgtttatccgttctttgattgctgacaagtatggtaaagaagttgctgataatacttcaatcctttatggtggcagctgcaagccttctaatgctaaagaattgtttgctaaccctgatgtagacggtggtttgattggtggtgctgctttgaaagttgttgatttcaaaggcattatcgatgcattcaaataattaatttcatcacagattactcaagcttacacagataaagaatcataaaatcgtctgtgggaatctgagtaatctgtgatgatttacctaaattcataaaacgacatgagatacatttttatcctactctttttaagtctcggactttccgccgtggcacagcagaacatagtagaaagcttgcagcgtaaccgtgccggagaaggtactgtaaccatctatcaagatcctaaaataacaggcttgattggtagtatctatacagggaatgttacgggaggtgagcagaaaatgttgaaagccagagggtatcgggttcaggtctatgcaggaaacaattcgcgtgtggctcgtaatgaagctaataacgtggctaccaaggtgaaagaagagtttcccgatatgcctgtctatgcctatttccagccgcctcgttggctgtgtcgtgtaggtgatttccgcagtattgaggaagcggatgccgctatgcgccgtctgaaggctaccggtgtttttaaagaagtatctattgttcgtgaacaaattaatattcccctggactaataacatggaagaactattgcatcccgaatggtcagcagagaaaattgaacagttgaaaggccattatcagagtattttatcgctattgggtgaagatgtagaaagagaaggattgctgaaaactcctgagcgcgtagccaaagctatgctgacattgacacgcggttatgaacaagatccgcatgccattttattgggagcaaaattcaaagaagaatatagtcagatggttatcgtgaaagatattgatttcttctctttgtgcgaacaccatatgcttccgttctatggaaaggcacatgttgcttatattcccaatggttatatcaccggtttgagtaagattgcccgggtagttgatgtgttttctcatcggttgcaggtacaggaacgtatgacattgcaaataaaagaatgtattcaggaaactttgaatccgctgggagtgatggtagtggtcgaagccaagcacatgtgcatgcagatgcgcggggtagagaaacaaaatgccattactactacttctgatttcacaggtgcgtttaatcaagccaaaacacgtgaggaatttatggatttgatacggcataaccggtaaggagttatgcctcctttattttaatactacccggtctccggcacgcttggccataattttttgtaattcacttaattctttaaagtgggccatgacttcaaggcatttatcggcattggctgctacttcaggcttgttcaatgcttgcagcgtatatttcatatcttcttctaaaatggcaagtttgaagtcgataagttggtgtggtactagttcgtgtaagcgttcttcatctttgaccatcgcttgtgaattgcttttactcaattggtaacgatcatttatcatatctgctgccagcttgctgattgtagggtcgggatgagccagaaaataacgctctgccgtgaagttggagtcatgcagatgagcttctgcctctgctagtattttccggtgcaacggattatggaactgtaattcatcctgtttcaaatccatggaaatatattctatcacagtgagcggagtttccgtattttcttccgtttctacatagcacatgactttctctccgtggcgtatcaaagtttgaagcagtaactgttcttttacataaaaaacgtacttttcccgtccttcttggggaatatacgattgataccctgcttctgcttctgcaggaggaaacggagggggaacatcatcatctacttctatggggggcatatcggcaggaggtatgctgccggcaggaaaaggtgcatcggcagaaggcagagagccgatagtggcggatgcgtctttttctttcttgatttgttccagatagttatcatcccgttgaagcagatgctttttgatctcgtctaaaataatttgctcgtttacgttcaagagggtagcacattctgtcaagcaggtatatcgaattactttatccggaatcagtccgatacttcgtgccatgtccgatatcaatccggcccgtttgatggggtccctttgtgcatcttttagtaaaaggttggtcttgaaacggataaagttctcttcgtgatcatcaatgtattttctgaattccgtggcattgtgttttctggaaaaactatcgggatcatctccgtcaggcagaagcagcactttgatattcatgccttctgcaagtaacatatcgatacctcggatgcttgcttttataccggcttcgtcaccatcatataatagggtgatattggaggtgaagcggtgtagcaaccggatttgttgttcgctcaatgctgtacccgagttggccactacattctccagcccgcattggtgcatggcaattacatcggtgtatccttctaccatgtaaacacagtcggcttttacaatggcagctttagcctgataaatgccatatagttcttttcgtttactgaaaatttcggattcgggcgaattgacgtatttttggtttactcccttggtgcggctgtccagtacacgtccaccgaagccaagcacttttccgctgatgttaaaccatggaaatatcacacgtccccaaaaacggtcgcgtaaactgccatcttctttttcgtaacatagtccggtcttgagcagaaattcttttttatatccttttcgcatggcttcttgtgccaatgcgtcagaagcggtagtgctgtatcccaattggaatttcttgacaatatcgtcacgaatgccccgttggcggaaataagacatggcaatggcttttccgtcagcgtggttgtagaggatgttttgaaaataatcgcgggcaaactcattgactacaaagagactttcccgtatattttgtacttgtttctcctcatcggtcaattcgcgttcctttatttctatattgtattttttggccagccagcgtagtgcttcgggataggtcatctgttcgtgttccataacgaaatggacagcatttccaccttttccacaggcgaagcatttacataatcctttggccggtgatacatagaatgaaggggttttgtcatcatggaatggacaaagtccgacaaaattcacaccgcgtttccgcagagtgacaaactcggataccacatctacaatttgtgcggcatccagtatccggtctatggtgggttggtctatcattgcgagtgcgaagatacaaaaaaaacatcgccaagggtgaacccggcgatgtttttaacggaatattgtaatcagaattatttaatattaggattcagcttgttccattcggaaaccggaggaagtactcccatcgcaatcacttcatcacgcaaagcacaaaggtgtgcataacttttttctaatgcggcttcttcttcgggcgtgcctttcacttcttttaagtggcagccatccttagcgatagaagtttcccaggccatcatgatatggtcgaacttaccattggatacgtaagtacctgcaggccagcggaatggctttcctcccatggcggcggcaatcatttcgatagaaacatatgacgggctttggaaagaagagcggccgcgcaggttgatgatgtttgcaccgcctttagttactttttgttgtatttcagtccattgttcttttgtcaaagcatcagtgccgatgatatcaagtaatgcttttccgtttactttagcggtagaagcataaacagccatctgctcaccatgaccgccatacgtgcggcagttttctacattatccatggcgatgccgaaatgcttggacaattcgctgcgcaagcgtgtagagtcaagagcggcaagagttgtaacttgtgatggtttcaggcctgaatataataaggtgatcagaccggtaatatcagccggattgaaaataaccacgatatgttttacgtccggacaataggcctttacattttttccgaattcttcagcgatggctgcgtttcctttcagcaagtcctcacgggtcatgccggctttacgtgccgcaccacctgagtttacaatatatttagcatcggtcaaagcttccttgatatcggaagtgaaagtgatgttcatgccttcgaaaccacaatggtatagttcttctgccacaccttccagaccgggagcgtatgggtcatacaaacaaatattgggagtaaggcccatcataatagcagtttgagccatgttcgagccaatcattccggcagcacctacgattgtcagcttttcattcgttacaaattccataattcttttatttaaagtttgtataatataaacgcttttgtgggagaggatgttctctcttccgggtacaaatttacaaaaccttttattaaggtgtttattctaaaaaattatatgggataatagaaagttatctcatataatcatcctaggatggtgaatttcagaatgcctgtcaatcaagatgttaaacagtatttattcaaacaggtttgtggatggaacaaataatgatatgatctgttatgtatttatgtttatataactttttaatgcatctacatattcttcaaaagcttcaagccctttttgtgtaatcttacaaatggtacaaggcatttttcctttaaatgtcttgatgacttctacatagtcagccttgtttagcttgtctatttgcacactcagattacctgccgttgctcctgtctgttgtttcagatagctgaactcggcttcttccactgaaaccagtatggacatcacggcaagtctcagttcggaatgtagtaatggattcaattctttgaacataggcgcaaagttacgattttttttgtttacgggcagcatgattcaacacatgtcccggaataaccatcataaaaataaagacaggagcgaagattaatatctggtttagacctggataaaaaaggcatccgatggagcttaacgctcccagtgtgccgcaaatagtgacagttttataacctatcaccagacctgttagtgtagttcccatgcccatcagcagaaggaccatgaataggatgggaagttgccagaaaaacatggcgagcatggatatcagaaagccggttatgccgaataccaaccaaatataattgattactttgtccaaatgagtcttgatacccggctgctgattacgtgtggaaaggtaagttcctgttcctgcgatgatggggagtaagaaccataggtattgccaataataattccgggtagttactaccagaaaccagaccagtaggctgacaaagatagtggtatatccccaaaaaaggaacggcatgccacaattggtttctagcctgttttttgtattctgaatcatttgagcgatgagttccaaactctctttctcattcaattttctttcttccatactgttttttctttttagtttgtgattaattaatatttgatgcttttctctatggctgtcatcagcaagctgattccccagcctgctatcacccatagtacccaccagtagtgtggactggtaaaccagtttatagctataagaaacaggtttattaccacataatagactaatgaccaagtgagccaattccaaaaatgacgggctctttgccggcatactacttcgatttgttcctgagttggaacggtttttttgttgttctgatttgttttcatagctttatttcttattatagtgatataaagtcggtggtttgtgctatattttcagtggcaaatctcggaatagttagtgtggcgcatgccaggatagtggcacgtttcttgtgaaatgttgtgtttgttttcattgttatgatgttttataggttgaatgataaaagtttattttacttaattactttacaaatataatatagtttataatataaaccaaattttcatagaacttttttcaaataataactgtcaagtgtgtatgtgtggtagagggggaagtgcaaaatatgtagtcttctttatggattttacattcagacttttgttggcacgtgcttgaacaaggaaattcttctctgctttttccttcctaaagtttttcaagagtggtagcattggcatctgtttttgctaactcagttgtgtgtgctgcgtacatcgtcctgtgttttccgtagctgtcttcccttccctgtcctggcttacggtgtttggttgcccctccggactcgcgctttccccttctttttttcctttttccgtttttgtttacgcgcgtgcgaatattataatgtgtctgtctttttcctcccgtgtcctccgttataaaaaccttctttgtaagacatctgtgattcagcgtattacaaaaaagtttcagggaatccggataatttgtcttgtgaaagtttgcctgttagcgttaaaaggtctacttttgcacccgcaatcgagagagatgcggcacttcagacagtgttactgacttggtgaaacaaacgtgggagatttccttgatagtgatctgcacctggtatcttaccttagcggggctaagggagcgagaacggataagaccccgggaggatggatggtccgccttttatggaagtttcgaaaaaaaactttttcaaaaaaactttcgaaaacatttggtggttacgataaaatctcttacctttgcatccgctttcggaaacgatggcaaacaggaataggagttctttgaaagatttaagataaacaaacaagtagtacaagccggtgcaccgtatatataatatggtgtacggaaaaacaagaaccgtcaatatttttattgtattgatagatttggagtccttgagcgtaaagtcaacttaagtgttgaaaagaatatttttacaatgaagagtttgatcctggctcaggatgaacgctagctacaggcttaacacatgcaagtcgaggggcagcatggtcttagcttgctaaggctgatggcgaccggcgcacgggtgagtaacacgtatccaacctgccgtctactcttggccagccttctgaaaggaagattaatccaggatgggatcatgagttcacatgtccgcatgattaaaggtattttccggtagacgatggggatgcgttccattagatagtaggcggggtaacggcccacctagtcaacgatggataggggttctgagaggaaggtcccccacattggaactgagacacggtccaaactcctacgggaggcagcagtgaggaatattggtcaatgggcgatggcctgaaccagccaagtagcgtgaaggatgactgccctatgggttgtaaacttcttttataaaggaataaagtcgggtatgcatacccgtttgcatgtactttatgaataaggatcggctaactccgtgccagcagccgcggtaatacggaggatccgagcgttatccggatttattgggtttaaagggagcgtagatggatgtttaagtcagttgtgaaagtttgcggctcaaccgtaaaattgcagttgatactggatgtcttgagtgcagttgaggcaggcggaattcgtggtgtagcggtgaaatgcttagatatcacgaagaactccgattgcgaaggcagcctgctaagctgcaactgacattgaggctcgaaagtgtgggtatcaaacaggattagataccctggtagtccacacggtaaacgatgaatactcgctgtttgcgatatacggcaagcggccaagcgaaagcgttaagtattccacctggggagtacgccggcaacggtgaaactcaaaggaattgacgggggcccgcacaagcggaggaacatgtggtttaattcgatgatacgcgaggaaccttacccgggcttaaattgcactcgaatgatccggaaacggttcagctagcaatagcgagtgtgaaggtgctgcatggttgtcgtcagctcgtgccgtgaggtgtcggcttaagtgccataacgagcgcaacccttgttgtcagttactaacaggtgatgctgaggactctgacaagactgccatcgtaagatgtgaggaaggtggggatgacgtcaaatcagcacggcccttacgtccggggctacacacgtgttacaatggggggtacagagggccgctaccacgcgagtggatgccaatccctaaaacccctctcagttcggactggagtctgcaacccgactccacgaagctggattcgctagtaatcgcgcatcagccacggcgcggtgaatacgttcccgggccttgtacacaccgcccgtcaagccatgggagccgggggtacctgaagtgcgtaaccgcgaggatcgccctagggtaaaactggtgactggggctaagtcgtaacaaggtagccgtaccggaaggtgcggctggaacacctcctttctggagaggatccaaagtaaaggtttttgtttttgtactgctgttgttgtttattcaagatatgattccgtattaagacggaagcgagaaagtaagaagccgggtctaatgaaacagactaggttgaacttagtcctatagctcagttggttagagcgctacactgataatgtagaggtcggcagttcaactctgcctgggactacgaatcttgagattcgggggattagctcagctggctagagcatctgccttgcacgcagagggtcaacggttcgaatccgttattctccactccatcagaaacgtaagatacgaagatgaccgatctatgacatattgtacaagcaaacagtaattttagtagtaaagagctgaaagtatatatcatcccgctggcacgcaagtgtgggcgaatgaataaggaaagtaaagaagggcgcatggcggatgccttggctctcggaggcgatgaaggacgtgataagctgcgataagctccggggaggtgcaaataacctttgatccggggatttccgaatgggacaacccggcgtgttgaagacacgccacctgatcatttcaggagctaacgcagggaactgaaacatcttagtacctgcaggaaaagaaaataacaatgattcccccagtagtggcgagcgaacggggaatagcccaaaccgttcatgttacggcatgatcggggttgtaggactacgtcgttgcatgaagacatcggagaagaactttctggaaaggaagaccatagagcatgacagttgcgtattcgtatgttgtcgaagcatagtagtatcctgagtagcgcggagcacgaggaattctgcgtgaatctgccgggaccatccggtaaggctaaatactcccgagagaccgatagcgaaccagtaccgtgagggaaaggtgaaaagcacttcgaacagaagagtgaaatagttcctgaaaccgtgcgcctacaagcggtcggagctgcttaaagcagtgacggcgtgccttttgcataatgaacctacgagttgcctttgccggcaaggttaagtgtgacgacacacgtatccgaagcgaaagcgagtctgaagagggcgtatagtcggcagtggcagacgcgaaaccaagtgatctacccttggccaggttgaaggctgggtaacaccagctggaggaccgcaccaataagcgttgaaaagcttctggatgagctgagggtaggggtgaaaggctaatcaaacttggagatagctcgtactccccgaaatgcatttaggtgcagccttgtgggttactgatgtgaggtagagcgactgataagatgcgagggcttcaccgcctatcaagtcttgacaaactccgaatgcgcatcagttttacctcaggagtgagggcatgggtgctaaggtccgtgcccgagaggagaagaatccggaccacctgctaaggtcccgaaatgacagctaagttaaactaacgaagtctgactgctaagacagctaggatgttggcttggaagcagccattcatttaaagagtgcgtaacagctcactagtcgaggagtctggcgtggataataatcgggtattaagttgtctaccgaagcagtgggatcattgaaatgatcggtaggggagcattccagtcagcgtcgaaggcgtaccgcgaggtattctggagcgtctggaaaagcaaatgtaggtataagtaacgataaagggggcgggaaaccccctcgccgaaagactaaggtttcctgatcaacgctaatcggatcagggtaagtcgggtcctaaggctcagccgaagggcgatgccgatggcagaaacggttaatattccgttactacctccaggagtgatgtggagacgcagtagtgacaatgccgccatctgacggaatagatggttgaagggtgtagatgttgatcttggcaggcaaatccaccatgagaatcgaacctgatagtatgccgcgtccctcgggacaaggcaatagtgcatgtaatcatgctgccaagaaaatccgctaaactaaatcctgtaggtacccgtaccgtaaacggacacacgtagtcgggatgaatattctaaggcgcttgagtgattcacggttaaggaactaggcaaactgaccctgtaacttcgggataaagggtccctacccggtgacgggagggcgcagagaataggtccaggcaactgtttaacaaaaacacagggctgtgctaaatcgaaagatcctgtatacagcctgacacctgcccggtgctggaaggttaagaggagacgtcatcgttgagagaagcgttgaattgaagccccagtaaacggcggccgtaactataacggtcctaaggtagcgaaattccttgtcgggtaagttccgacctgcacgaatggtgtaatgatctggacgctgtctcaaccgtgagctcagtgaaattgtagtatcggtgaagatgccgattacccgcgatgggacgaaaagaccccgtgaacctttactatagcttatcattgaatctgggcacgtgatgtgtaggataggtcggaggctttgaagggggtacgccagtatccttggagccgctgttgaaatacgacccttcatttgtttggattctaacccgtgtatatggggacactgattggtgggtagtttgactggggtggtcgcctccaaaagcgtaacggaggcttctaaaggtgccctcacggcgattggtaaccgccgttagagtgtaatggcataagggcgcttgactgggagactgacaagtcgatcaggtaggaaactagagcatagtgatccggtgtttccgtatggaagggacatcgctcaaaggataaaaggtactccggggataacaggctgatccctcccaagagctcatatcgacggagtggtttggcacctcgatgtcggctcgtcacatcctggggctggagaaggtcccaagggttgggctgttcgcccattaaagtggcacgcgagctgggttcagaacgtcgtgagacagttcggtctctatctatcgtgggcgtatgaaatttgcgtggctctgacactagtacgagaggaccgtgttggacagacctctggtttaccggttgtgccgccaggtgcattgccgggtatctaagtctggatcggataagtgctgaaagcatctaagtacgaagccggccacaagattagatttctcagggtcgttgtagactacgacgttgataggatgcaggtgtaaagatggagacatcaaagccgagcattactaattgcccgtccactttccttatattttggatggtgtatacgttcggttattactacaggataagataacgctgatggcttgtcgatatgtcgctcttattcaggtggctatagcacaagggttccacctcttcccattccgaacagagaagttaagccttgtcacgccgatggtactgcgtcacagtgggagagtaggtagctgccgtttttgattgaagcctccggacttgaagaagttccggaggctttttttttgcatccacgtgtgaatttacatccacgtgtggctggctctgtttccccgggcctgcccggctggctccgccatgctccttctccggcgggaagcaaccccggaagttttgccctgtagcgggcaatgttcatgtctatgtcataaagtgagtttaatttgtgtcaattcaattgggcctctatatctaaagtgatctataactttggagatacacttctatagagatacttgtagatgtatatcttcctataaactgttactctaaaaatagaataaataaaaaatcgtagtttatattatgaaaaaactttcatttttattttgtgtttagaaaataatctctacctttgcaacgttttagataaaataagagataaacaatgaaccaaggatttatacatattttgctatgcggcattattattctactggcaaagtcagcaggaagtgagtgttgtgcataaaagtatgtgtgaataatgatatacgaaagcctttctcacttccttgtgtgaaaggttttttttatgaatgtaataatgtataaaattgaaatttatgagtgacagattatttatttttgataccactcttcgtgatggcgaacaggttccgggatgtcagttgaatacagtggaaaagattcaggtggctaagcagttggaggctttgggagtggatgtgattgaggcaggatttcctatttcaagtccgggggacttcaattcagtaattgaaatttctaaggctgttacttggccaaccatttgcgcgctgactcgtgcagttgaaaaagatatcgatgtagctgctgacgcattgaagtttgccaagcacaaacgtattcatactggcattggaacttcagattctcatatcaaatataaattcaattctactcgtgaagaaattattgaacgtgcggtggctgctgtgaaatatgcacgtcgctatgtagatgatgtggaattttatgcggaagacgcaggacgtacggataatgaatatttggctcgtgtggtagaagctgttattaaagcgggagcgacagtagtgaatatacctgatactacaggttattgcttgcctgaagagtatggggcgaaaattaaatatttggtagatcatgtagatggtattgataaggctattatttctactcattgtcataatgatttgggtatggctactgctaatacgattagtggtgtgttaaatggagcacgtcaggtagaagtgactatcaatggtattggagaacgtgctggtaatacttccttggaagaggtggcaatgattgtcaaatgccataatgatattaatattcagacaaatatcaatactcagaagatttatccgactagccgtatggtgtcaagtttgatgaatatgccggttcagccgaacaaggcaattgtgggacgcaatgcttttgcacattcatccggtatccatcaagatggtgttttgaagaacgtacaaacatacgaaattattgacccgaaggatgtgggcattgatgataatgctattgttttgactgctcgtagcggacgtgctgcgttaaaacatcgtcttcatgttttgggagtcgaactggagcaggacaaattggataaggtatatgaggatttcttaaaactggctgataagaagaaagatatcacagatgatgatattctggtattggcaggtgccgatagaagtgttaataaccatattaaactggattacttgcaggtaacaagcggagtgggagttcgttcggtggcaagtttagggctgaatattgcaggagagcactttgaagctgctgccagtggaaatggaccggtagatgctgctatcaaggctttgaaaaaaattattgaccgccacatggtgttgaaggaatttacgatccaggctatcagtaaaggtagtgatgatatgggtaaagtacacatgcaggtggaatatgacggacagatgtactatggtttcggagcgaatacagatattatcgctgcatcagtagaagcatatattgattgtatcaacaagtttaaaagataataatacgtaaaatggctaacacattatttgataagatttgggatgcccatgtggtacaaaaggttgaggacggacctactcagctttatatagacaggctttattgtcatgaagtaactagtccgcaggcttttgcgggactgcgcgcacgcggggtgaaagtctttcgtccggatcatgtatattgtatgccggatcacaatactccgacacatgaccaggacaaaccgattgaggatccggtttctaaaacgcaggtggatactttggcaaagaatgccaaagatttcggtttggctcatttcggtatgatggataaaagaaatggtattattcatgtagtaggtccggaaagagggctgactttgccggggatgacaattgtttgtggtgactcgcatacttctacccatggtgcgatgggagctgttgctttcggtattggaaccagtgaagtagaaatggtgttggcttcacaatgtatcttacaatctcgtccgaaaaccatgcgtatcactattgatggcgaactgggtaaaggagtgacggcaaaagacatggctctttatatgatgtctaagatgacaaccagtggtgctactggatacttcgtggaatatgccggttcagctgtccgtaacttgagtatggaagggcgtctgactttatgtaatctgagtattgaaatgggggcacgtggtggcatggttgctcctgatgaagtgacttttgaatatataaaaggcagggaacatgctccgaagggtgcggattgggataaagcggtgtctcattggaaaacattaaagagtgatgatgatgctgtatttgataaagaggttcgttttgatgcagcagatattcagccgatgattacatacggaacgaatccaggaatgggtatgggaatcactgaacatattccggtagatgataaaagtgcttcttttaaaaagtctttggactatatgggctttcagccgggagaatacttgctaggtaagaaaattgattatgtatttttgggtgcttgcactaacggacgaattgaggatttccgtgcctttacctctttagtgagagggaaaaagaaagcagatcatgtgattgcatggctggttccaggatcatggatggtagatgcacagattcgtgaagaaggtttggacaaaattttggaggaagcaggattttctatccgtcaaccgggatgttctgcttgtctggctatgaatgatgataagattccggccggaaaatattcggtatctactagtaaccgtaattttgaaggacgccagggaccaggtgctcgcacgttgcttgccagtccgctggtagctgctgctgcggcagtgaccggtgtaataacagatcctagagaactaatttaaaaatgcgaagacaatgaaacagaaattcaatatcataacaagcacttgcgtaccccttcctttagagaatgtggacacagaccaaattattccggcccgtttcttaaaggcgacaactcgtgaagagaaattctttggtgataatctgttccgtgactggcgttacaatccagatggttctcttaacaaggattttgtattgaataatcctacttacggtggacaaatccttgtggcgggaaagaatttcggttctggttccagccgtgaacatgctgcatgggctatcgccggatatggtttccgggtagttgtgtccagcttctttgctgatattcataagaataatgaattaaataattttgtacttccggtggtggtgagtgaaggattcttgaaggaactttttgattcaattcatgcagacccaaaaatagaggtggaagtaaatttgcctgaacagactataaccaacaaggctacaggtaaaagcgaacattttgaaatcaatgcatataagaaacattgtttgatgaacgggttggatgatatcgactttttgctgaccaacaaagacaagatagaagcatgggaaaaagcgtcaaaatagaaatcatggacacaacactccgcgatggtgaacaaaccagcggagtatcttttgtaccccatgaaaaattgatgattgctcgattgctattggaagatttaaaggtagacagggtagaggttgcctcggcccgtgtatcggatggcgaatttgaagccgttaaaatgatatgtgactgggctgcccgccggaatttgcttcacaaagtggaggtgctcggatttgtggatggccgtacttctgtagactggatacaacgtacaggatgcagggtaataaacttattgtgtaaaggttcgttgaaacattgtacacagcagttgaagaaaatgcctgaagaacatattgaagatattgtgaatgtggtgcgttatgctgatgaactggatattgccgttaatgtatatctggaagattggagtaacggtatgaaagactcttctgactatgtattccagttgatggacggattgaaggatactagcatcaagcgatatatgttacccgatacattaggtatcttgaatcctttgcaagtgatagaatttatgcggaagatgaaaaaacgttatcctcatacccattttgatttccatgcgcataatgattatgacttggctgtgagcaatgtacttgctgctgtgctgagtggggttaaagggcttcatactactatcaatggattaggggaacgtgcaggaaatgcaccacttgccagtgttcaagctattctgaaggatcattttaatgctttgaccaatattgacgaaagccgtctgaatgatgtgagccgagtggtggaatcttattcaggtattgttattcctgccaacaagccgattgtgggtgagaatgtgtttacgcaagtggccggcgttcatgccgacggtgataacaagaataatctttattgcaatgatttgctgccggaacgattcgggcgtaaacgtgagtatgcgttgggcaagactagtggcaaagccaatattcgtaaaaatctggaggatttgggtcttgatttagatgaagaatccatgcgtaaggtaacggaacgtattatcgaattgggtgacaagaaggaactggttactcaggaggatttgccttatattgtttccgatgtgctgaagcatggggtggtaagcgaaagtgtaaaattgaaaagttatattgtgacactggcgcatggactgaagccgatggctactgtgaaaatagagattaatggaaaagagtttgaggagaattccagcggcgacggtcagtatgatgcttttgtgcgtgcattgcgtaaaatttataaagtgacactggggcgtaaattccctatgttgaccaactatgcggtaagtattcctcctgggggccgtacagatgcatttgtacaaacagtaataacttggagttttgaagaaaaagtatttcgtactcgtgggctggatgctgaccagacggaggctgctattaaggctaccatgaaaatgctgaatataatagaaaatgaatatgaataataatggttagtgattaatggttagtggttaatgaacagtgttgtcagatttcattaaccgccaactattaatcactgaccgctaaccattaatcactaaaaaaatggattttaaaattgcagttttagccggtgacggtatcggaccggagatttcagtgcaaggcgttgatgtgatgaatgctgtttgcgagaaatttggtcataaagtaagttatgaatatgcgatctgtggtgcggatgcgatcgataaagtaggtgatccgtttcctgaaatgacttttcaggcttgtaagaatgcggatgcagtgttgttttctgctgtaggtgatcctaaatttgataatgatcccacagcaaaagttcgtccggaacaaggtttgcttgctatgcgtaaaaaattgggtttgtttgctaatattcgtcctgtgcagacttttaaatgtctggttcataaatctccgttacgggctgaactggtggaaaatgcagattttatctgtatccgtgaattgaccggaggtatgtatttcggagaaaaatatcaggataatgataaggcatacgataccaatatgtacactcgtccggagattgagcgtatcttaaaagtggcttttgaatatgctatgaagcgccgtaagcatcttactgtagttgataaagccaatgtgttggcatcttcacgtctgtggagacagattgcacaagagatggctcctcagtatccggaagtgactacagactatatgtttgtggataatgctgccatgaagatgcttcaggatccttgtttctttgatgtgatggtgactgagaatacatttggtgatattctgacagatgaaggctctgttatcagcggctctatgggattgcttccttctgcttctacgggtgaaagcactccggtattcgaacctattcacggttcatggccacaggctaaaggattgaatatagccaatccattggctcaaatcctatcggtagccatgctgtttgagtattttgaccttaaggaggaaggcgccttgattcgtaaggctgtagatgcttctttggatgaaaatgtgcgtactccggaaattcaggttgaaggtggggccaagtatggtaccagggaagtgggtgcttggattgtggattatatcaagaaagcatagaaatttataggtcttttacggggaatcagaagtgaatggcattttacttctgattctttatttttattggataagaaaaagtatatttgatgctgcaaataaaacaaagataataattgaaagacatttaaatgaagaatttagtttatgctttggtaggagctggttttatgattgcctgccagccttcgagccgaccggaaatcagcggtacgctgactggtatcgagagtgatacattattggtacaatcttttcctgtaaatgatcgtgatagtcgtaggacagatacggttgccatgcaaaatggaagttttgcctttaatttaggtaatagtgtattgaaacaggtttatatttatggtaaaccgtcagtgaaacccaatgaggatggcagtatacctgccatatcgatgaaagctgtaagttttttgctgttgcctggccagcctataaaaatttcaggttcattggatgaatataaattggagggaggttccttttatgacgattataatgaagtggtggaggactgtaaaacatatagtcataaaatagattcattgaacgtagtctgtatggatatggagaaaaaaggaatacccggagattctatccgtaaagtttatgctccagcaaaagaatggtatggaaatattttaaaaataaaaagtgactatgttaggcagaatccggataaagatgtatcagtatatgtaatgtcacagttgtcaagggatcagttgggggatgcttttaatgttttgactgatcgggtaaaggaaggaatgatggctcctttatatcagagaatgagagaaggatatgagaaagaactggctcgcgataaagcaaaagaagcaatgaaaccaggtaatctcgctccagaatttactttgaaggatttggatggaaagaattttgacttatcttctctgagaggtaaatatgtagtgcttgatttctggggaagctggtgtggatggtgcataaaaggaattcccgaaatgaaaaaggcatatgaaaaatacaagggaaaaatagaatttgtagggattgactgcaatgatacagaggataaatggaaaaaagcagtagctgagcatcaattgccgtggattaatgtacgcaatataggtgaaccggatgtggcggtgatgtatggagtaagtggttatcccactaaatatgtgattgatcctgaagggaaaattgctaaacaggtagttggcgaggaccccgaattttatatgtatctggaggcattgatgaaatgatgaaaggtttcggataattatgaataacagaggtgtgctattatttgaacacatctctgttgtttaatttagaatttttttacgcgtatatgacagtaaggttctcctcccattttatcgtaatagtgctgatgatagccttctgcttcccaaaatttctcggcagggcgtaatctggtattgactctatgacctttcgagcgaagcagttcgatgacctcttcagcttcggatttttgtttttcatccatgtagaaaatcatactccgatattgcggcccgaggtcgggacctattccatcggtttgtgagggatcatgtatttcaaaaaaaagtttgcacaaatccacataagaaaccatgtcggcgtcataatctacaaaaatagcttctacatggtgtgtcatgtgggcttttacctgagtatatgcggggttggcttccggaccacctgtataaccgactgtagtgtttagtacacccggaatacgttcaaactgatgttgtacgccccagaagcatccggcggcgaatatcgctttttctactttcatgttctttattcttttaaaattgtatgccaaatatacggaataccctttaaaacgagaaacctaccttatgctttttttaattaaactaaaggaatatcgttaaagattcctctacctttgcaaccggaattaattaatatagaaaatcggatgaaacagatcgtatgttatcttatgttgctatgtgcatgtatgcagttgcaggcgcaaacttacgatgaactgataaccagtgcgttggatgcggcaaaaaaagacagtttgacaaaatcagaaattttgttcagacaggcattgaagatggatcctgccaatatgcgtaatgctttattgtttactaatctaggaacggtccagcggagattggggaaaatagatgatgctattgactcgtacacgttatccttgaatattactccatattctgttgttacattgctcaatcgtgcttcactctatttggagaaaaatttgtttgacagggcttatgtggattattgtaatgtgatcgatatagacaagaaaaataaggaagcattacttttccgggcttatatttatatgcaacgtagggattataaaggagcgagaatagattataacactttattacaggaggaaccgggaaataatactgcacgtttgggcagggcacttttaaatcagaaggagttgaagtatcgtgaatctttagaagatttcaacagattggtttccgataatcccagagatgtctcttatttgaaagctcgtgctacattggctgtagaaatgaatacgcctgatctggctttattggatttggaggaggccgccaaactggcaccggacgatgcggaaatttatgtgatgtgtggtgagatttatttaagtcagaaaaagaaaagagaagcgtatgttgcttttgaaaaagcaatagagttgggagtgccccgaccggagttgcaggataagctgaaagcgagtaagtaaaaatgcgaacaggattattgtcagacaatcatcgtgcttttacaataggaacagaatttatctgttcctattgttggtatatgagggcaatagcttttaaaaaaggtattttcattcctgcaataccttttttatcaactctataaaatcttttccgtatttttctttcttatattcgccgataccattgatgttgccgaatgcttctatagttgtaggttgttgggtggcgatcaggtgcaaagtcttgtcggatagaacaatataggcaggtatagcttgctggtctgccagttttttacgcagtacacgtaactcctcgaacaagtccttgttttcattaccaaaagtaaccggagtgggaaagagtacctcttccttggctttctttttacgtttttccttagcaggtatgaattcttcccgtttgatgactaccagcatggcgggttctttgccgaacaatactttttgcccgctttcagttattttgaggtgattgttttcattataggctatttcgaaatagcctagattcagcatttgcagtagataatcttgccagtcgcgtgcaggaatatctcttcctgcagcatatgttttcagtttgtcataacctttgtcaatcagttcttggttcgctgaccctttcaatatgtctattaacatgtgggtgcctatttgttggttagttcgggctattgcacttaaagctttttgtacaatgattgttccgtcaaagcgctcggggggattacggcacacatcacagttgccgcaatcatggtccattgtctcaccaaaatagttcagcagaatacgcctccgacagatatccgattcagcatattgttgcattcggtgtaatttctctaagttaatttcctgctggctgctttctgtagcgaatttggaaagcataaccaagtctcccagtgaatagaacagcaaagtatcactttccataccatcacgtccggcacgtcctatttcttgatagaaactttctatgcttttaggaaggttataatgaataacccagcgtacattggatttatcaattcccatcccgaaagcaatagtggcacacactacctgtacacgatcgtttatgaaatcattttgtgctttatcacgcatatcactgcttaatcctgcatgataaacggttgcacggataccttgtttcatcagcattgcggccacactttctgttttgctgcggctcatgcaataaatgataccacattcatttttgtgtttttctataaattcaaggatagtccgtgccttatccttttgttggtagcctctttttacttccaaactcagattgggacgatcaaaggaagatatgaatattttaggatctttcaaggccaattgttgtgcaatgtcttttcgggttattttgtcagctgtagcagttaatgctacaattggtactttgggaaactgattacgtagtacctttaattgggtatattcaggccggaaatcatgtccccattgtgagatgcaatgagcttcatcaatggcaaataaagatatttggatatctttcaacaggaaatttgtttctataagtaatcgttcaggtgaaatataaagcaatttgatttttccttgaagacattcgcgacgtaggtttatattttctgtttcattattgctgctgttcagtgcccgtgctgcaattccgtttgcttgtaaactttccacctggtctttcattaaagaaataagaggtgaaacgacaatggccgtaccttccatcagtaaagccggtaattgataacagatggatttccctcctcctgtaggcattaataccaaagtatccttttgagctaatatattttgaataatatcttgctgtaaaggacggaaactatcgtatccgaagtaattttttagagtttggaacatatctgtttattattttaaaatgtaatcggctacaaaggtagtaaaatctttagatttggtcgggatctctgcctgataataataaataagatatacttttattcgtaactcatttggttggaaattactacttgaaagagaagccggttattgtagatcggacaaataaacttttttgccacttaaaaaacaaagtgttgtgattatttaagaaataaattaggcaaaaaaagttgcatatgaaaaaaacttttcccacatttgtccaaaattagatgtttgcatttatataactaaccaaacaacgaaaaattaaaagaaaaattaactgatgagcgacgtggaaaaaaaatcagaaacccaggaagcggctcctaagaaaaagccgtataacctgagagaaaagaaagagaaaaaggctgcttacagatctctgattagagcagaacttgccgatgaattgtatgataagattttgaacattgtagttgttcagaaaaagtacaaagatcctaattattcagcaaaagacttggcgaaagaattaaagacaaatactcgttatttgtcagctgtagtgaattcccgcttcggaatgaattattcttgtttgctgaatgaatatcgtattaaagatgctttgcatcttttagttgataaacgctatatggataagaatgtggaagagattagtgcaatggtaggttttgctaatcgccaatctttttatgctgcattttataagaatgtgggtgagactcctaatggctatcgtaagagaaatcaagaaaagaagtaagagcataatttgctacattataatttagaaaaaggaaaacaattgttttcctttttttatttcggctcatgaattatgtatctatgaaaaaaagttgattgtagaaatgaaacaggctggttgcaatgaagtagacaagagcatgaataaaatggaggaatttaattacacggttgaacaatttgccgacttacagttacttcgatataaagtgtatggatttgaagaactgagtttgaaacaaaaagagttgatttactatttgtcacaagctgctttgcaaggtcgtgatattttgtttgatcagaatggcaaatacaatttgcttattcgtaaaatgttggaaaccgtatatacagagtatcagggagatcgtacagatgtgaatttcgtcaatttggaaacttatctgaaacgtatatggttttctaacggaattcatcatcattatgcttcggataagttcgtaccaggtttcactccggaatttcttagagacgcattgaatagtgtggatgcattgaagttgcctttgggtaaaggggaaacagtggaagaactttgtgaagaagtctttccggtgatttttgatcctgaaatgatgcctaaacgtgtgaatcaggcagacggggaagatttggtcctgacttcggctgcaaattattacgaaggggtaacccagaaagaagcggaagatttttatcataatttgaagaatccggatgatatgatgccggtaatgtttggtatgaacagccgtttagtgaaagaggacggaaaagtacaagaaaaggtctggagatctggcggattgtatgggcaagccattgataagatcatttattggttggataaggctcttggtgtggcagaagatgcacaacaaaaaatagttatcgaaaaattaattcgattttataagaacggggacttgaaggattttgatgaatattctattgcgtgggtgaaggatttggattcacgcgtggattttgttaacggctttattgaaagttatggagatccgttaggattgaaagctagttgggagtccattgtgaattttaaagatctggaagcaaccaagcgcacggaaatcatcagcgctaatgcccaatggtttgaagatcactcacctgtagatcatcggtttaaaaaaaaggaagtgaaaggtgtgtcggccaaggtgattacagccgctatgctggggggggatttgtatcctgctacggcgattgggattaatctccctaattccaactggattcgtagtgtgcatggttctaagtctgtaaccatcggaaatctgacagatgcctataataaagcggctcatggtaatggatttgcagatgaatttgtttgcggtgccgaagagaaagaatggataaagaaatatgcagatcttacaggggatttacatactgatttgcatgaatgtttgggacacggttctgggcagttgttaccgggagtagatcaggatgctttgaaagcgtatggatctacgatagaagaggcacgtgccgatttattcggtttgtactatctgccggatgacaaaatgatagaattggggcttacaccggatggagatgcctttaaagcagaatattatacttatatgatgaatggtctgatgacccagttagtccgcatcgagttaggtaatatggtagaggaagcacacatgcgtaaccgccagctcattgcgcggtggacatttgagaaaggtgctgcagataaggtggttgaaatggttaagaaggatggaaaaacgtatgtgaagataaacgattatcaaaaattgcgcactctgttcggacagttgctggctgagatacaacgcattaaaagtgaaggcgattttgaggctgcccgtaaattggtcgaaaagtatgcggtgaaaatagatccggttttgcatgccgagatattggcacgttatgaaaaacttcatttggctccttacaaaggttttgtaaatcctgtatatgaggctgtgacagataaagatggaaatattatagatgtaaaagtatcttataatgaaggttacgcggagcagatgttacgttatagcaaagaatttgcgaatcttccttatagaaatgaataagaaaaaatatggatgtacatgaaacaataaaagacataaaggggcaattccgtttgtttatgaatggggtggcttcccaaagtatgcgcgagaagggattagactataaactgaattttggcatcgaacttccgcgtttgaaagaaatagctgctcgttatgaaaaaaatcatgaagtggcgcaggctttatggaaagaaaatatccgtgaatgtaaaattctggcggggatgttacagccggtagaaacattttatccggaaatagctgatatatgggtagaagatatgcgctatccggaaatagcggaactgacttgcatgagtttgttccaatatttgccttatgcttcggagaaggctttcgaatggatggccgatgatcgtgaatattttcagttatgcggctttatgctgatggcaagactattgatgaagggtaatcagctgactgagcgttcggaagctgaatttttggatcaggcaatggccactttacaaagcgagggagtgttgccccgcaaagcagctgctactgctttgaagaagtttgccgttcaaagcaaagaaaatggcaaaaaggtgaaccgattgttggctccattagccaaatcagataaggtagaaatagcttctttggctggagaaataaaattagaaacagaatattggcattaaactttcatgttatcataaaaaggcttaactttgacggcggaactgaaatctgtgatggaagagaatgtgaaagataaggtaaagcagatcttgacagaatatctgcaggttaacgggcatcggaagacacctgaacgatatgctatactcgatactatctattccattaaaggtcattttgacattgatacgctttataattatatggcaaatgaagggaaattccgggtaagccgggctactctttataataccatcattctttttatcgatgcaaaattggttattaaacatcagttcggcaattcttcccagtacgagcgtgcgtacaacaatgaaacccatcatcacatgatatgtacggaatgtggcaaagtgaccgaatttcaggatgagaatctgaaacaagccattgccaatacgaagctgaagaaatttcatgcctcgcactattccttatatatctatggtgtatgcagcaagtgtacttgggccaagcgtaggaagaaaaaagataagtaacataaaacgaagaaacatgaaagtagatgtcttgttaggtttgcaatggggtgatgaaggcaaaggaaaggttgtcgatgttctgactccccgttatgatgtagtagctcgtttccagggaggtccgaatgcaggccatacactggaattcgaaggccagaaatatgtgctccgttccattccttccggaatatttcaaggaaataaagtaaacattattggtaatggtgtggtactggatccggctttattcaaggctgaggctgaagctttggaagctagcggacaccccctgaaagaacgtttgcacatttcaaagaaagctcatttgattttgcctactcaccgcattctggatgcagcctatgaagctgctaaaggagatgccaaagtgggaactaccggaaaaggtataggccctacttatactgataaagtgagtcgtaacggcgtacgtgtaggtgatatccttcataattttgaagaagtgtatggagaagcaaaggcacgccacgaacagatcttgaaaagtctgaactatgaatataatataaccgagctggaaaaacaatggttggagggtattgaatacctgaaacagttccatttggtggacagtgaacatgaaatcaacaatcttctgaagtcgggtaagagtgtgctttgtgaaggtgcgcagggaacgatgcttgatgttgatttcggttcttatccttttgtcacttcttcaaataccatttgtgccggtgcttgtaccggtttaggtatcggtcctaataaaattggtaatgtatacggtatcatgaaagcgtattgtacccgtgtgggatcaggtccttttcctaccgagctgtttgacgaaactggtaagaaaatccgtgatttaggtcatgaatatggtgcggtgacaggtcgtgaacgtcgttgtggctggattgatcttgtggctttgaagtattctatcatggtaaacggggtgacccagttaattatgatgaagagcgatgtgttggatgatttcgaaactatcaaagcatgtgtggcttataaagtaaatggtgaggaaattgattactttccttatgatattagcgaggggttggaacctgcatatgcggagcttcccggatggaagactgatatgaccaagatgaccagtgaggatgaattcccggaagaattcaatgcgtatgtcactttcttggaagaacagctggaaaccccgatcaagattgtttcggtaggtcctgatcgtggtcagactattgaacgttatacggaagaataatagggaagaatcttataagataaaaaagagatactgttttcttttggaggcagtttctcttttttttgtatacatctatctgtttctatgtatatttgataaaattgtaacatctataatgatacccatgtaagataatatatctttcgtctttatcgtctatatctttccggttgctattcaagatgtgtgtggagcatcaattgtgcattattgcgtattattgtgccaaatcgcgtcaaatcgcgtcattccgtccgggcttctttctatatttgccataaataaaaaaatattgatatggcattacaaacaaccggattggaatttttctacctgagtgtggatttcttcgagaatgataaaatattgttggtggaacaagagttgggcagtcgggctacattgcttgtattgcgcttgttggcacgtatttaccacaaaggatatttttgccgttggggaaaggatgagtgtctgctttttacccgcagattgcccgaaggctgtacggccgattatgtacagcaagtggtggatgcactattggaacgtggcttttttagtaaagtccaatacgaaagatttggaattcttacttcggaaagcatacagggccattattttgaggcggcacaacgacggaagcgtgtagaggtgcgggctgattacttgttgatagagatttcaaaatacaagaatttgtatgtagacggcagtaacgtaggcatttcaacggaaaatgtggacatgaaaaccggaaatgtaaacatgaagtcacaaagtaaagcagaggaaagtaaagcagagcaaaaaaatgaaaaggactcctcctctttttgttctccagaaaagaagaggatttttgcggagaaagagaccttttcttctattcctgtagatggaaaacgcagaaatacttccggactggttgaagctttgcagcagtgggggataggagatgataatttatataaaatagtggggtactgtgattatggtgtgatagggcatccgatatggaaaatattagctgatatgcgtatgtcaggtggaaggatacatcaaccgttagcctttatttggtcgcgcctgcgagtttgaccgattaggatttagtagattgataaatactgtaattgtgtaataaaaaaaacgattgatagttttatggttcatataagtagaaaataaatagaatattaaatagataatagcctgatttttagagtgctgattatgctaatggtagagtataagtagaaagtgactaaaaaaatagttataatatattgtgtatcaagtaaaagggagaaataatataagtatggtggactgaatgaatagagggggaacggtaagcataagttcttttggaactcattttatcaataacattgcaaagatataaaattttattaaaaataaaagaataaggctattatttttgtctataatattttttattcataagtattatttagttgcgatatttgttaaaagtagggtatttattttattttgagtatgaaatgatgtaaaacacatgaaaattgtcaagaaaatcactttttttctttggtaatcattttcttctttatatatcttgttcccaataaagtagtctgctactttttatttctttaactattagctccctgtgtgaaattactcttttaacagttgaatatctttggaacgactaagatttagacgttttttataagaaatggattcttgtattttcctcttttgtagaactgagttccaaaagaacttggataatgtttaattaaaagagagtgagtatgaaagaaaaagtgttaatgttactagcttgtctgtggttgggtatcggcttctctatggctcaagcgcctaaaacagttgcaggagttgtaacttcagcggatgatggtgagccgataataggtgcgtctgttttagtggaagggactactatgggagcgattacggatgtggatggcaagtttgctatcaataatgttcctgcagatgctaaagcgctgattgtttcttatttgggtatgattactcagcgagttggaattcagcgtggtactattactgtaacaatgaagtcggacacaaaagtgttggatgaagtggttgtaactgctcaaggattgaaccgtaaacaaaaagcgttgggttattctacacaaaaggtagcaggtgaggatttgactatttcacgacagactgatttgggtaatgctatggctggtaaagtgtcgggagcacgttttataggtggtgccagttcaggttttgatgcaggtactattattttgcgtggtgcaggttccattccttcttcgtcccagtcggataatccggccaatgaacctatttatgtggtagatggtgctatcaccaacaaaaactctatcaatatggatgatgtagaaagcataaacgtattgaaaggtcccgcggctactgccctttatggttcgcgtggtggtgcaggtgctatcatcataactactaaggcgggacaaagtgagaaagggttgcttgaagtaagtcatacattgcaggccgaaacttactataatcatttcaatatgcagaagctgtatggtggcggaggatatggaggtacggaaaaaggtaacagggctcaggatatttatgatttgtatagtggtgatattcccggtttgcaaggtgcttatgtgtacgattataatgaggacacttcttggggagctgcatacgatccggctgtgaaatatgtcactccattatcattggacgaaaccagtgattattatggaaaaccagccacttggcaacatgggttggatttgagagatctttatcggactggtgtaaccaatacaaccaacgtttcgttttcaaagagtgtgaaagattttaatacccgtgtttctttcaccaatagctatcgtactggtgtgcaacccaattcggatgctattcgccgtttcttagggttcaagactaatttcaaacccacaccgtggatgaatgtgtcattggattataaatatacttatcgtcaagatcataatgctgccgaaagtggatataacggttcacgtaccgttttgcaggaatatacccaatggggacagaccaatgtcaatttaaaagattataaggactataaacgtccggacggatcatggaggacttggaatatcaacagtgtgaataaccaaagtgctgcattccatgataatccgtatgctttgtttcatgaatataatcatcgcaccatttatcaatggaatgtattcagtggtgatgtgtctgtggaccttccttataacttgaaagcaggggtacgcgtaaatggtaacatacgtggttacaaattggaacgcgaacgcccttcaggatctattaatttccggtcaaattatcgtcaggatcaaagcagtttaattgatttgaccgtacaaggacgtttgacttggggacaatcattctttaaagacaaactaacggtagatgcggctctttttgcagaagtacgtgactatacatacgataatttatatgcatataccaatacaaattatgacttgtctttggataattattataatttggctgcttcatcgggtactattgccttggcctataataagaagacacattacaaggaacgtagtgtttatgccacagctactatgggctgggatgatacttattttcttgatgcttctgtccgtaacgatatgtcatctacgttgagtcctaatcacaatagctattggtatggtggcctttccgcttctgtccttgctcataaatgggtgaatgcagaatggctgaatttctggaaactgcgtgctagtgcggctcaggtaggtactacgcttgatgcttataatatttatcctacttattctctagataccagttatggttcacatgttacaatgtatgaaccttcttctcagaaaaattataatattgagccgtctatttccacttcgtatgaaataggtacggaattccgtttgttcaataatcgtttatggggtgatttcaactattatactcgggatgacaaagatcagataatctctgtaacctctgctccacaatcggggtactccactcgtaagatgaatgctggtttaattcgtaatcggggtgttgaattgagtttgggcgggatgcccgtttccactaagaactggaaatgggaaatgaatttcaatatagcgaagaatagcaataaactggtggaactagctgatggggtggattcttactctatttattggacttcattcacaactcgtttgtataattatgctatggttggtaaatcacttggtgtgataaccggtaatacatgggaacgtgatgacaatggcaatataattttccatgaactgagtgcctcgcagaaggcgttgtatggtggtgaatatgtacctacttacaatcagaatacactagatgaactgggtaacttccatccggatttcacaggtggttttaatactagtatcagttttaagaatttccgtctgtcggctaatattgatttctctgtaggcggtcagattgtatcctatactaatatgtggggtagcagtagcggtattcttgataaaacagctgaacttaatgaccgtggcgtcaatgttcgtgaaccggtaagcaaaggtggtggtatccacatgactggtgtggatcaggatggtaataaggtagatacctatgtcaatgccaaactgtattataccacagcttcccgtgtatgggaagaatgggtgtatgaccgtacttacgtgaaacttcgcgaagtgtcattgtcgtatgtgttcccgtcacaaactttgaagaaactaaatatcggtttgagtcgtgccagtgtggcaattaatgcttccaatccatggttgatctattcagcttgtcctaatgtggatgtgtctgaaattggtatgggatattttgagggtggtaatgccgctgcaacccgttcgataggttttaccgttaatcttgctttttaaaccataaaacgaagaatcattatgaaatatattaaattattatttttatctctgagttttgcagcaacattcacagcatgtgatatgactgactttggcgatattaacaaagatcccaatgaaccgtcggaggctaatactggtatgttgtttacatacgcttgtacttatgtgaaatacttctctatgaactcaaattattattacccgtggacgcaaatgtatccggggtatatgtccgagaaaaataataatcagtatggtgcgtttggcggacctactatgagtacaagttcttattatctttatccgttgaagaactgcgagaagattattgactttaatagtgatgaggctgaaaaaggtaaacctgccattgtacagtttggtgataatgccaatcagattgcggttgcacgtacattgatgggattcatctatatgcaccttacagatgctctagggccacttccttatacagaagcgtttcaggcaggtgaggaaaattttactccggtatttgattcacaggaaacgatttatgctaagttagatgccgatttgagggaagcgtataatcagtttaatgaaagtggctcgttgagtacagccgacatcctgttcgatggtgacattcgtgcatggaagaaactgaatgcttctacccgtatgatgcttgctataaaactggcagatgtggatcctgccgaaggacgctcgcgttttgctcaagcttacgccgatggcggtattgaagaaaatgcctataatttgaattatacttttgaggccaatactgtgggatatttatattataatggtgtaaacaataattataattttgtccctaataagtattatgtagatcagctgaaggagttgaaagataaccgtctgttctctacttgttcactgattcctttcggtaagacacaggcagaggcgggcgtaacgaatgaagacttgaagaattttgataaataccaaggtatgcctttgggtattgagtctgcagatgtgaatacgtggaacaaagtctgctgtttttataatccttcgctcacacaggtaacctctacttttcccattattactgctgctcgtatgttgcttatcgaggctgaggctgctcaacgtggctggattcaggctgatcctgcccagctttatgcagctggtgtgaaggcatcgttcgaacaatggggggccgaaggtgttgatgaatatttggcacaggaagcagttgcctatacaggtactgatgctgataaaattaacaaaattgctcttcaacgctggattagtggctttatggctgatggttttgaggcatggtctgactggcgtcgttttgatattccgaaactagaagtcggtccggtttgtacaacgattgatcatattccttatcgccatcaatttgatagcgaaatttatcaaggtaatcttgaaaattatgaagctgccgtgaaagcagatttgaatggtgatgatagccgtgagcaacgagtatggtggaatagaagataagatttgaaatatataaattctctttaaagtttcgtttaaatataggggacattctcagtgatgagagtgtcttcttttattgaaataaatccaaaaatatataggataaacgttagttaagactaggtagttcataaattgcctcgatggatagatatacgtattgctttttcttattgacttttgttgtgttcggttgggtagaatttgaagaagcgattgttgggatattgaattttttatgaagaaattctcctgttttaaagcataaaaaaaggctatctatcccagacagccaatcttttgttaaccttaaatctaatactatgaaaaacacactacaaagatacggactttatttataatagcaagtttctagtctgtatttcgccgttttataacatgctttataaatatgtcgtgtcttgttaacaaatgaatctaaaagtgtaaagttttgtttattataacctttcgaacttcttgtcttatgaatgatagaggaggacaaacgaaaataaaagtctgtgatggttattttctatttcttattttatatctttgatggcactttactgattgaaaaaataatagttgcttatgaaaaacagacagtttattgtatttgctcttttattagcgtgtccgttgctgttacacggacaggaaacgtctctctgtggaaaagaatcatgtaataaaggttatatccggcatccatggtatggaaaaaaggttggttatataggagactcgataactgatcccaattgttatggagataacataaaaaagtattgggattttttgaaagaatggttggatatcactccttatgtgtatggagtgagtggacgtcaatggaatgatgtaccccgtcaggcagaacaattgaaaaaggagcatggagaagaggttgatgccatcgtggttttgatggggacaaatgattttaatagcagcgtacctgtcgggacttggtttgcagagaaagaagagcaggtgatggctgcccgtggtgaaactaaaaaactggaaacgcgtaaaaggcgtgttcctataatgacgaatgatacgtataaaggccgtattaatattggtttgagtcatttgaaaaaattgtttcccgataaacaaattgttttgttgaccccattgcatcgttctttagcagaattcggcgaaaagaatgtacaaccggatgaaagctatcagaataaatgcggagaatatgtggatgcttatgtacaggccattaaggaagcaggtaatttgtggggagttcctgtaatagattttaattcggttacaggtataaatccgatgattgaagaacaacttatttatttctatgattcggggtatgatcgtttgcatcctaataccaatggtcaagaacgtatggcacatacattgatgtatcaattactttctttgcctgcatcattctgacagttggacattcatttttttgtctttttggaagagtttgtttatttgggagaacctcctatgtttcgatgtgaactttgaaggattgaaaaaatgttcaaatggcaaataaatgttatttgaacatttttttattagttcttatttactgaaagagtaattgagctattgattttgaacaaatttctatattcttgtatcattttttatggtttcttttcttgttcttgtttacttttgcctgaatcttttaacttataaaatgtatatgaaaaacatgaaattaaaagtattacttgctttatgtgctttactcctgttatcggcttttattgctgagagaaaagaacccattactatttttatgattggtgattccactatggcgaataaaagtctgaagaatggtaatatagagcgtggttggggacaaatgcttcccggatattttacggaagaggttgtggtggataatcacgctatgaatggaagaagttcactcagttttatcaatgaaggacgttgggatgtagtgctttctaaaattcataaaggtgattatgtatttattcagttcgggcataatgatgagaaacctagagccacattacatacagaacccggaagtacctttgatgataatttaagacgttttgtgaatgaaacacgtgctaagggaggaaatcctgtactgttcaattctatagtccgtcgtaatttccctcctaaaggtgtgacggagataaagggtagttatgaaaaagaaggtccggtattggttgatacccatggggaatatctggaatctccccgtcgggtggccggagaaatgaatgtaccttttattgatttgaataaattgacccatgacttggttaccggtatgggagtcgagaattcaagaaaattgtttatgtggattccagcaggacaatatgaattttgtccggaagggaaaattgataatactcacttgaatatatatggtggacgtatagttgccgggttggttgtggacgctttgatggaagaagtgccggctttggcaaaatatgtgcgacgttatgattatgtggtggcgaaagatgggagtggggatttctttacagttcaggaagcagtgaatgcggcagttggtggtggcaagaaaacaatatctatacttgtccgtccgggagtatatgaagagtatgtttctatgccggaatcatcgcctcgaatagaattggtgaaacagacaggggctgagatcagggataacgggttcacacaagatgtttatgtggcaccttataagggtgacagagtatgtgctattagttatacatttgatgatggtttacaggaacactatacgttgcttttccctaaattggaaaaatatggctttaaaggtactttctggatatggggtaaatgtatagagaatgaaagtgctatgcagggaaaaccgagaatgtcgtgggcgcaaattaaagagatgagtgacaaagggcaagaaatatccagtcatagctggtcacatacgaatttaaagcgtgtttctttggaggaagtaaaaatggaagtagagaagaatgacagtatactttatgagaaaacaggaaaaataccgcgtacattctgttatcctttcaatgctgttaatagtgatatattaaaaataacttcaaagaacagggtaggtacacgtaccgaacaatatcccatcgggggagataaatcgaaatcaactcctgagtctttagataaatgggtggaaagcttggtaaactccggtagatggggagtggcaatgatacatggaatatcgcaaggatatgatgcttttctgaatcccgaaatattgtgggaacattttagtaaggtaaaggctctggaaaataaaatatgggtgggtacatttagagaggtggctgcctatacaaaagaacgagaaaaaattcgcttgaatgtgctagaaaaagaaaacggctataacataactcctcatttggatatgaatgcacaattatttacggaaccactgactatggtattgaaatctgtgggaaatagagtttcggagattaggcaagatgggaaaaagctttttctaaagaaggatgctgataagattcttttcgattttaatccttatggagggatgattcagattcgttttatctgaggtgttggatatagtttgtaaaactagaatagggaaatccgttagtctttattgtaaccatttaaggtgtgataataagattaacggatttgttttttgcacttttataaggttactcagaattaatttctaaatttgttcccgttaactttattccttttccaaaagaaataaaatggaaaacacagagaaactgatagtagaacaactgaaaaatggcaacgaagatgcttataaatacatctatgattatcattatgttcttttgtgtcatgtagcaaatcaatatttgaacgataattttttatcggaaactatagtcggagatgtaatttttcacctttgggaaatcagagaaactttaaacattactatttctattagaagttatctgataaaggccgttcgtaatcgttgtatagactatctgaaatctggatctgaaaaaaaggaaatttcattttcagttctagtaccggaagagatgtctgaagaaaagtatttgcagtcagataattatcctttgggaatattattggaacgtgaattggagcatgaaatccgtatggcaatagacaaactaccgattgaatgtagatgtgtttttgaaaaaagcagatttgaggagaaaaaatatgaagaaatttctcaggaattaggtatttctataaatacggttaagtatcatataaagaatgcattatctttccttcagactgaattgagcaaatatttaattgctttgattttatttttttcgtgttgaaacagaaaaaagtttcttttaggactaccctgtatttaaaataaatcgtcttcactttagaaacaacaaagatgaaagcagaaaaagaacatattgatgaattaatagtatcctatttaagtaatgagttggatggaaatgctgtgcatgaactgaaggagtggatagctgcgtctgtggaaaatgaaaagtattttatgcagcggcaagaaatttggttttctgccataagtgatatgaaaaactctatatataataaagatgaggctttccagttatttaggaaacgggtggatacatatcaaaagaacaagatgatgaggaagaggctaagatggaaaatagtctataaatatgtggcttttatatcaataataggttttatctcttatttctcgtattggaggggtaaaagtaatcttaaaaatgttttaacggaaacggggatagaggtggaaacacctataggatcacaaacaagactccgtttgccagatggtactatagtgatacttaatgctggatcacgtattatttatccacaaaattttggagtatacaatcgtgatgttgagttacaaggtgaaggttattttgaggttgctcgtaatattgaaatgcctttttatgtgaaaacaaaagagttacaagtaagagtacttggaactaaatttaattttagagattatcctgaagataaagaagttgttgtgtctctgttagaaggaagaattgttttaaataatcagcttcagagagaggaggaattattattattacctaatgaacaggtgatattagataaaagagtaaagactatgaaaaaagaatggaaaagggatggaataaatatagaatggataaccggtagacttttctttgatgaaatacctttaccagaagtagcacaaatattggaacgtaattatggcgttcgaattaaatttgctaatgatgctttaaaaaaaattcgtttttatggaaattttaataaaaacggtcaaagtgttagagatattctggaggcattatcagcaacggaaaaggtacattatactttaaatgataaagaaataattttatattaactatttgtctaatcttaaataaaaagaactatgaatagaagtacgtaaaataagggtgggaagactggatataaaaaagtcggaagatctgcgaaatctcccggcttccatattattccctcaaaatgtcaaatgtgagatcttttttgaggaatgtgacaaaagtaataaaaatatttcttaaaatcgccttcctacaaaagtttttaattttttaaattctaaatttatgaattacaaaaggagggccatcttgatggtcggggctgtattatgcctaaatttaagtgtgtactctcaacttatatcgttgaaaatgaatgatgtttcagtgaaaaaggcgatgatggaattacaaactaaaagtggtttctcatttgtgtatattgctggagatttggatattcggaagatggtaacaatagatgctaatcaattggatgaagctattaatcagattttgaaaggacaaaatgtttcttatgaaatacaagggaagaatattgttattaaaagaattcaggaactaaaagtagcgaatgaacaaaaaattaaaattagtggtattgtaaaagatgtaaatggagcccctgtggttggagcaacagttaaagaaaaagggacttcaaatggtactattacagatattgatggaatttttatgctggaagttcaggaaaatgccttattagatatatcatatattggatttaaatctcaacagttgaaagtacagaagggaggtaaggctttatcagttattttgaaagaagattctgaattattagatgaagttgttgttattggttatggaacacagcggaaaggggaggtcgctagttctattgccactgtaaaatcagagaattttttgaaggtcccttctccagatgctgctcagatgattcgtggacaagttccgggactagctgttataaccccagatgccaatcctctttcttcttcccaattatctttgcgtggtatcacaacattagggcaaaacaccactccgttaattctcatagatggaattcctggagcattaaattctgtttctcctgatgagatagcacaaatagatgtattaaaagatggttcggcagcagctatttatggtacacgtggtactaatggagttattcttattactacaaaacatgtaaatggggaaatgccaacaacagtagatgtgaatgcttatatttctattcaacagatcgtgaaaaagttgccaatgatgacagcaggtcaatatcgtgagaaagtagctcaaggagggtatggtggtgcgactgattatggtggtgatgtggattggttggatgaaataactcgtactcctatttcacaagtatataatgtaagtttaagaggaggaagtcagacaactaattatttggcaagtcttgaatataggagtttggagggtataattcaacgttcggacaaccagatcatttatccacgcattgaggttactcatcgcatgtttaatgataaattgcgtattaatgcagggttgaatggttctctaaaaaaatattttgatggtgcagatggtggtggatataaaacagatgtttatgcaggagcgattcaatttaatcctacagatcctgttagagatgaaaatggaaattggaaagagagacctattaatgattatttaaatccgttggctcttttatgggaaacagagggagagaataaggaaactgctttaagaatgtttgctaatttggcatttactcctattgcaggattaaatattaaatatactgcatctaaaaatatttttaatcagatccgaggatattatgaaacgaagcaacattcttcaactactaaaaatggtaagaatggatatgcatctcgtggtacacaatctacatatgaaacattatctgaattgacagttcaatacaataagacattatttaaagatcataattttactttgttgggagggtatagttggatgaaaagtgggtatgaagattattggatgcaaaattgggattttccttcagatgattatacatataataatatgagtgaaggtcaagctttacgtgatggaaaagctaatgaagattcggagaaaagggagaatttgttgattgcttattttgctcgtttgaattataattataaaggaaaatacattttatctgctagtataagacaggagggatctactaaatttggtaagaattataagtggggaacttttccagctgtatctgtagcatggaatatagtggaagagaattttctaaaggatgtgtcatctctttctgcattgaaaatacgtgcgggatttggtattacaggtacggaaccatattctccttatatgtctcttcgttcgattaattttaatgattatgcatattatgatggcacttggattaagtctgttcatcctagttccaatacgaatccagatctccgttgggaaaagaaagaggaacttaatgttggcctagatgttggcttttttgataatcggttaaccggaagcattgactattatagaagaacaactaaggatttgatttgggaatataatgttccttcacctccatatttatttcctacaatacaagctaacggagggtctatacgtaatacaggggtagaagtttctatacaggtaacgcctgtttcaacaaaagattttcaatgggtaacaaatataaactattctagtaatgcaaataaattagtgacactttctggtaaatttgttgcaagtacatatttagatacggggacaacgggatctcctatgtggcaggcaacacacagaatacaagaggggcaatctttcggtaatttttggggatataagtctattgatatagatgatgatgggcattggataatagagggtgaagatggaaccccaaaatctataaatgatgcgcttccttctgataaaaaagtattaggtaatggcttgccgaaacattatgtgaattggaataacacttttggatataaaaattttgatttaagtcttacaatgcgtggggcttttggttttcaaatatggaattcggctgctgcttttcatggggtacctgctatgtttactgcaggatggaatgtaatggagaaagcttttgatcctgtctttgggaaacgtcctcttgctgtagatcaaccactggcttacgtaagttatcatattgaaaatggtgactattggaagattgataatctgactttaggctatacttggaatacaagatggaattggttgaaaaatattcgtttttttggttctgtttctaatcttgctgttattactggatatagtggtatagatccggaaactcctgtaaacggaatgtatccaggtatagataatcgttatagatatccttcggctagaacttatacaattggtatgtcatttaaattctaaatattatgaaaacaataaataagatagtaggtatagttacttctataagcttggcgggaataatgtcatgttgtagtaatgatttaacagaaaaagtatattcttcaataacacaggatagttatgaatatacggtaaaagattttaaatctgtggtttcaagtgtatattcacctttacgtggagtgtttagccatacgggattttggacagcgaatgaagtgactggagatgcaatagtatctcctcctactgccacaggttggtatgatggtggccaatatatgcattttcattatcatgattggaattctgagctggctaatattaaagaattttgggattggatgtatcggggagctttatttgctaattattctatagaattgattgagagtggtaaagtacccgctccttctttggaggcaaaggaacaaggaataatggaactaagagcagctagagctttttattattggttgatatgtgataattttggagatgctcctttggtaattactacatcagatgaaatgccagaaaaaagttctcgtaaggaaatctttgattttatagtaaaagaactgattgaagttataccttatttaagcgaggagcaaggaggtgctatgtatggacgatttaataaatgggcggcaaagacattgttggcgaatgtgtatttgaacgctgaagtgtatacaggaacggctcattgggaggattgtattgtacaatgtaacgatataatcaataatagcccttgtatgctctctcaaaattttaaagattcattcagatcatctggagttgagtcttcaaaagaaattattttagcagtaccttatgataaaattattgcaacaggaaatgatatgcatatgcgttcttggcaagctcagttaaaagataaatttaatttggaagcaactccttggggaagtggaacaacaatggcaataactcagtttgctgatacttatgatgaagatgatagtcgtatagatgatacatggcttagaggagcacaatatagtagtaacggtgaaatactaaaggggatttatgataatataggtgaggattttatcattgtaaaagagatacctgatgctagttatgtaaaagaatttgaggggtggcgcatgaataaatttgaggtcgctcctcagactccttcttcttctgatactgatttcccttttttccgttttgctgaggtgttgatgatgaaagcagagtgtttactgcgaacggggcagccgggggctggtgctttggtttctcaggttagggaacgagcttttagagatcatccagaaaaaataatggttacggatgagcaacttaaagctaattctatttatcaatatggttatgtagagaaatatcatattgtagatccaggtaatcaagacccggttgagttcggacgattgtatgatgagttggggtgggaatttgtttgggaggctcaccgaagaagggacatgattcgttttggtttgtttactaaaaaaagttggttgtcacataagcctaaaggagattaccgtagtgttttccctataccagaggttgttttaacttcaaatccaaaattaactcaaaatccgaattatttgcaaaagtaattgatttttgttctcaacttgaaaatatataataaatattgacatgaaaaaatataaaatattattgtttgtaattgtgatgtcctgcatatcaaatgtttatatgtggggaactactaagcctttatctaaaaatagaatagatcttttttcattgagtgaggttcgaattacggacaagtactttaagcatattcaggatttagatcatcaatatcttttaacgttggagccagatagattgttatcttggtttagacgtgaggcaggattgactcctaaagctcaaccctatcctttttgggaatcagaagatgtgtggggaggcggaccattagctggacatattcttggtttttatatgtcctccatgtctatgatgtatcagacaacaaatgataaaatgattcttgatagattaaattatattgtcaatgagttactgctttgtcaaaaagctcatggagatggttatttattagctactgttaatggtaagcaagtgtttgaagatatgattgatggagattttacgacatccaatcctctaatcaaccaaacttgggaacctgtgtatattatgaataaaattatgctaggactttatggagtttataagcgatgtcatatacaagatgctaaaagaatattaatgggaatggcagattggtttggttatgaggtattagataaattgaatcatgagaacattcaaaaaatgttggtatgtgaacatggatctattaatgaatcttatatagacgtatataagataactggagataagaaatatttagaatgggctaaaaaattaaatgatgaggatatgtgggtacctctttccaaaggagaggatatactgaacggttggcatgctaatacacaaatacctaaatttacaggttttaatgcagtttatcgatatacgaataataaggcttacaatgatgctgctactcgtttttgggatattgttgttcaaaagcatacatggataaatggtggaaatagtactggagagcattttttcgaggaaagtatgtttgaaaagaaaataccacaatatggtggtccagaatcatgtaactcagttaatatgatgcgattgactgaaagtctttatcaaactgatggcagagtagataggattgattattatgaacgtgtactttataatcatattttagctaattatgacccggaagaaggaatgtgtgtttattatactcctatgcggcctggtcattataaaatatatggaacaaggtatcattcattttggtgttgtacaggtacgggatttgaagctccagcaaagtttgcgaaaatgatttatgcacataaagataattcactttatgtaaatatgtttatagcatcaacgttggactggaatgaaaagaacattatgattactcaatctactaattttcctgacgaagatcagacattacttactataaagtcttcatctacacaacaaatagatttaaaaatacggatccccttttggatcaaaaataaaagtatggttgtgagagtaaataataaaattgtgaaaggcataaaatcagaaaaaggttatgttacaatatcacgtgaatggtcagatggggatgaaattaaagtgacatttacacctctattagaaattgtacctttaaaaaatagtgaaagatatcttgctatgacttacgggcctattgtgttagcgactaaaatagacaatactaatattgggaaagaagaattccgacatgagcgtaaaactgttagtaatgtaatgattcctatgtcagatactcctgttttgtttggaacattgaatgaaataaaaggtaatatcagacgagtagttgggaaggaattattatttatctataatccgaaagaaggaaaatctgtaaaattggttccttacaataggataaattttagtcgatatgctatttacatgattcatgttgatgacaaagaagagtatataaaaacagtttgggatggtagctattatgtcaatatgaatcaaaatttaggaacgataaatgtagatgctatttgtataggagatactgattctgaacgaatgcataagatagagcaggtgagtaatattacaggaaaatatgattatatttcatcatggcgtcgtgcagtcaatggaggatattttatgtataatttagcatcacttccagataaggagcagacactttatattgcgtttcgggggaatgatcaggatgaatttgcttttgatttgttgatagatggacaggtgattaaatcatttgtgcgtagtctaggtgatgaagggttggtcacgaagaattatgcaaaatatattcctattccttttgaattgacccgtggtaagaaaaatataacattgaaaattgccgctagattaaagaatatgacaggagatattttcgatattcgtatattgccatcaaattcagaaatggatctcaagtaaattcaatgaaaaaaagagttttataagagatgtttgttaaaaaggcagaggttttatttaagtattgaagttcgaatagatcgaggaccattcctagatatttgaggtttggtcctcaatttatgattctatttaaagatttttctaaaagccttcgcattattttttttgaaataagcgattgtccgaaaagagggcgttaagcctcctaatagctatcataattccacatttaccttacaggagtactccagttttcttgatgaccttattgaatacttataaccatataaatacaattttagtaatgttgcaggattatacggtaggctccttttattgaagtttgacatgtttaaccccaagctcatttataggcaagatatccataaataaattgataatccttgcccaagaatttggagcaatcaattggtcgagaggtatcatttgaatttgatttctgttttctcctactatgtagtttatagatatgttgtctagtttctttccataaatatataaaaaataggtgacaattaaatatagcttctaaggttttgcacagactcttgggagcttacgatgttaccaacaaatggtgaagtcgttatttagctctccgaggaagttagtcattaagttctagtttgaaattagcaggagtaaagtataaagtgaaaaaatctcttctcgaaaatgtagacataaaaaaaggagcaacgccttgctccaacctttgttaaccttaaatctaatactatgaaaaacacattgcaaaggtacggactttagtgaattttgcaaataaaacaactaaaaaaatatgttctctaacacgttttaatacttttatcctatttgttaaggataagggccttttttatttacttgtattttatcttttttacatataaaaccgtatatttgttgccacttttgcaaaaggataaaaacgaatggtttcagtagataatttgaaagtagagtttggagtaacgcctctgtttgaggacgtgtcatacgttatcaataagagagatcgtattgcgctggtcgggaagaatggggccggtaagtctactatgcttaaaatattggcaggaatacaggcgcctacttcaggtagtgtttctgttccgcgtgatgtgacgataggctatctgcctcaagtcatgattctgagtgataaacatactgtgatggaagaggcggagatggcttttgaacatatctttgacttgcaggctagtattgagagaatgaatcaggaattggcggatagaacagactatgattcagaaaactatcataaactgattgagaaattcacacatgacaatgaacgctttctgatgatgggaggtaccaattatacggctgagatagaacgtacattgatggggttaggatttaaccgggaagattttaaccgtcctacatccgagttcagtggtggttggcgtatgcgtatagagttggccaagttgttgttgcgacggcccgatgtgttgctgttggacgagcctaccaatcatctggatatagaaagcattcaatggttggaaaactttttgaagacaagtgcgggggccgttgtattggtgagtcacgaccgcgcatttattaataatgtgaccaatcgtacgattgaaatatcttgcgggcatatctatgattataaagtggcttacgatgagtttgtggtattgcgcaaagagcgtcgtgagcagcaattgcgtgcatacgagaaccagcagaagcaaattcaggatacggaagatttcatagagcgtttccgttataaggctaccaaggctgtccaggtgcagagccgcatcaagcaattggaaaaaatagttcctattgaaattgatgatgaagataattcagccttacggttgaagtttccgcctgccatgcgttccggcaattatccggtcatttgtgacggggtgaagaaagtatacggcagtcatcttgttttccacgatgtgactttgactattaatagaggtgagaaggtggcttttgtcggaaagaacggggaaggtaagtccactttggtgaaatgtataatggacgaaatcccatacgaaggtaaactgaccatcgggcacaacgtacagattggttattttgctcagaatcaggctcagatgctggatgaaaatctgagtgtttttgatacgattgattatgtggcaaaaggggatattcgtttaaaaattcgtgatattctgggagcattcatgtttggaggcgaggcttctgataaaaaagtaaaggtactgtcgggtggggagcggagtcgtcttgccatgataaaacttttgttagaaccggtgaatttccttattttggacgaacctaccaaccatctggatatgcgctcaaaggatgtattgaaagaagctatcaaggaatttgatggaacggtgattgttgtttctcatgaccgtgagttcttggatggactggtgaccaaagtttatgaatttggaggtggagtagtaaaagaacacattggcggcatttatgattttttacagaaaaagaaaatagagagtctgaatgagttgcagctttcggcttctcctactgtgtctgccactaaaaaggaagaacccgaaacggtcagtgagaacaaattatcttatgaggcgcaaaaggaattgaataagaaaattcgtaaattggagaaacgaattgcggattgtgaacaaaaaatagaaaagctggaaactgagattagcggggtggaagccgatatggctactcccgaaggtgcatcggatatggctttgtatgaaaagcatcagaaactgaaaaaggacttggatcagacggtagaagaatgggaggtcgtttctatggaattagaagagatgcagggaagttaatatgtatcatatatatagaacaaatgaaagcaaaacattatttaccaatggctgtattggctctggcagtagctgccggatgcgacagtaaaaaggaagccgtcatgacttcgggtatagacttgacaaatttggacactacggctgttcaaggagctgatttttatcagtatgcttgtggcggatggatgaagaaacaccctctgaccaatgaatattcccgttttggctcattcgatatgcttgccgaaaataaccgggaacaactgaaaggattgattgtggaaattgctgccggacagaatgcgcaaggtacaataggtcagaaaataggggatatctataatctggctatggatagtgtgaaactgaatgcggatggagtaactcctattcaagctgatttggaaaagattgcttcagtgaaggataaatcggaaatagttcctttgatggcggaactggctcatagcggtgtattcccttatttcagtttctatgtgggtgccgatatcatggacagcaagagcaatttgtttcaattgtatcaagggggtatcagtctgggtgaaagagaatattatttggacaatgatgatgtgactaccaatatccgtaataagtataaagaacatattgtaaagatgttccaattggctggttttgatgaggctgccgctaaaaagaaaatggaggctgtaatggatatcgaaacccgtattgcaaaagcttctttcagtgcggtggaacagcgtaaccctgcggccaattatcataaaatgtctttggatgaattaaagaaagagattccgggcattgactgggatgctttcttgaatggtataggcgtgaaaggggtgactgaactgagtgtttctcaagtggagccgattaaagaggttgagaaaattatcaatagcttgccggttgaaaatcagatcgcttatatgcaatggaatctgatagacagggctgccggttacttgagtgatgatttggtagcacaaaactttgatttttatggaaaaacactatccggtaaacaggctaaccaacctcgttggaagcgtgccgtaagtactgtgaatggggtactgggtgaagcggtaggtcagatgtatgtggagaaatattttccggcagccgcaaaagaacgtatggtgcagttggtaaagaatctgcagaccgcattgggagaacgtatccggaatttggaatggatgggtgacagcacaaagattaaagctattgagaagttgaattctttttatgtaaaggtaggctatcctgataagtggagggattataccggtttgaatattgaaaaagattcttattgggccaatgtgaagcgtgctacagaattcgaactggattatatgttgtccaaggcaggcaagccggttgacagagatgaatggggaatgactccgcagactgtcaatgcatattataatccgaccacgaatgagatttgttttccggcaggtattcttcaatatccgttttttgacatgaatgctgatgatgcatttaattatggagctattggcgtggttatcggtcatgaaatgactcatggattcgatgatcagggacgtcagttcgataaggatggtaatttgaaagattggtggacagccgaagatgccaaacgttttgaagaacgtgctcaggtaatggtgaatttctttgatagcattcaggttttgccgggactcaatgccaacggttctttgactttaggtgagaatatagccgaccatggtggtttgcaggtttctttccaagcgttcaagaatgcgacaaaagatgctccgctaccagtagaagacggatttactccggaacagcgcttcttcttgtcatacgccggagtgtgggctggcaatatccgcgacgagcagattcgtttgcaaacaaagtctgatccacattcattgggcagatggcgtgtgaacggagcactccctcaaattggtgcatggtatgatgcttttggcattaaagagggggatcctatgtatttggctcctgaaaaacgtgtctctatttggtaagctttatacataaaagataataaaaagcatggtaattgctgataatttggcatttaccatgctttctttttggaatttacatgataaacacctatttttgtgcccgatgaaacggagacgatatatagcatgggtattaatgttggtcagcataatcatgttgactgcatctgttctgcctcatcatcatcaccgggaaatcctttgcttgcagcatgatatgactttgtgcggctgtcaatgttctgtacagcatcagcagcataatagttccgatgagaatcatacatgtaatgccggatgcgtgaccaagtttaaaagtgtaactccggatcgggctcaggacagtgtttctcctgattattcgttttgtttgttgctatatacggtaacggatgtattggcgctttcattgcagttgactgaacacaacacattaccttataattactatttagaaaaactgcattctacgtgtcttccccacgtaaaggggttgcgtgctcctccttgcgatgttcttgcttaacagatagaaagtttatctttttatccgcaactttgttgcattttctttacgctaattttgtatttaataaaaaagtaagaacaaattatatcatcatgaagaaacttatctttatgggagtcttgggattatttcttttaggctcttgcaacagtaaatcggaacatgaccatgaggggcatagtcatgaaacggaaaaagcacataatcatgatcatgaaggccatgatcacgagcatgaggaacacgatcatgcgagtgaaaaccacgaaggacataaccacgaggcagagatggcagccggacattccgatgagataatcctggctccggaaaaagcgaaagcagctggagtagaatcggaaataatccagcctaaatcattccgtcaggtaataacgaccagcggacaggtacaggcggcacaaggtgatgaaagcgtagtagttgccaatgtagccggtgtggtttctttccgccatccggtaacggacggtatgagtgtgagcaagggggctcccattctgaatatctctgctgagaatatgccggacggagaccctgtaaaacgtacccgtatcgcatatgaaaccgccaaaaaagaatatgaacgtgccgccaagttggtaaaaagtcagataatatcacagaaagatttcaatgccattaaggagagttatgaaaatgcattattggcatacgaggctatttcaaagaaccagaccaagacaggtgtgtccgttacagctcctttaggtggctatatcaagaattgtctggtgaaggaaggtgattatgtgtcggtaggccagcctttggtgagtatcactcagaaccgtcgtctgttccttcgtgcagatgtttccgagaaatattatggttatctgcatagcatccagtcggcaaacttcaagactccatacgataataaggtatatgagttgggtgagttgaaagggcatctgctttcttatggtaaagcatccggtggtacttctttctatgtacctgttactttcgaatttgataatcggggagatgtgattcccggttcgtatgtggaggtgtatctgctctcgtcggaaatgcccgatgtgctggccttacctgttacagcattgaccgaagaacagggcttgtattttatttatctgcaattggatgaagaagggtataagaaacaggaagtgactttgggggctagtgacggaaaggaagttcagattcttacggggttaaaagccggtgaccgtgtggtaacaaaaggagcctatcaggtgaaattagcatcggccagcaatgcgattccggctcatagtcatgaacattaatcaagccgccctatgctaaataaaattatacatttttcccttcaaaaccgtatattggttctggtggcgtcggttttgctgcttattggcggtacttacacggcttttcatacggaagtcgatgtgttccccgatttgaatgcgccgactgtagtgattatgactgaagcgaatggtatggctgccgaagaggtggaacaattggtaaccttccctgtagaaactgctgtgaatggtgcgaccaatgtgcgccgggtgcgttcatcttccaccaatggcttttccgttgtgtgggtggaatttgaatgggatactgatatctatctggcccgtcagattgttagtgagaaattgtccttagtcagcgaggaattgcccgagaatgtaggtaaacctaccatgggacctcaatcctctattttaggtgaattgctgattatcggtctgacttcggatactacttccatgctcgatctccgtacactggcagactggactatccgtccgcgcctgctttctacgggaggtgtggcacaggttgccgtgctaggaggtgatatcaaggaatatcaggtgttgcttgaccctgcccgcatgaaacattacaatgttacgttggcagaggtgatgaacgttacccgtaacatgaatcagaatgccaatggcggagtgatttatgaatatggaaacgaatatattgttcgtggggtgctttccagccatgatgtggctcagttgtcacgttccgtcattaagacggtggaaggggtgcccgttacattggaagatattgccgatgtgaagatcggttcgcaggaaccaaaactaggtactgcttcggagagaggaaaacctgccgtactgctgaccgttaccaaacaacccaagactgggactattgaactgacagagcaattagaagccgcattgaaggatttgcagaagaatcttccggctgatgtgcacgtttctacagatattttccgtcagagccgttttattgaaagttctatcggcaatgtgaaggattcgttgtatgaaggtgctatttttgtggtgattgttctcttcctgttccttgccaatgtacgtaccacggttatttcattggtaacccttccgttgtcattgattgtttctatattgactcttcactatatggggctcaccatcaataccatgagtttgggtggtatggctattgccattggttcgttggtggatgatgctattgtggatgtggaaaatgtatggaaacatctgcgcgagaaccgcttgttgcccgaaggggaacgtaaaagcgtgattgaagtcgtgttcaatgcttcgaaagaagtgcgtatgcctatcttgaactctaccttgattattgtagtcagctttgttcctttgttcttcctgacaggaatggaaggtcgtatgctggttccgctgggcattgcctttattgtggcgttgtttgcttctacggtagtggctttgacactgactccggtactgtgcagctatctgttaggtaataataaaagtaaaggattacccaaagaggcatttgtagccgtatggatgaaaaagcattaccgcaataccttgttatggtccttgaatcataaatccgtagtattgggttttacaggtggactgtttgcggtggcattggttatgttttttgcattaggacgtagttttctgccatctttcaatgaaggttcgttcaccattaatatcagttcattgccgggaatttctttggcagaatcggacaaaatgggacaccgtgcggaagagttgctgatgtctattcccgaaatacagactgtagcccgtaaaacgggacgtgccgaactggatgaacatgcactaggggttaacgtgagtgaaattgaggctccgtttgaattgaaagaccgttcccgtcaggaactggtagccgatgtgcgtgccaagttatctaccattaccggtgcgaatatcgaaataggccagcctatcagccaccgcatcgatgctatgctttcgggtaccaaggccaacattgccatcaaactgtttggtaacgatttgaacaagatgtttgccatcggtaatcagataaaggatgctatcagtagcgtggagggtattgccgacttgaatgtggaacaacaaatcgaacgtccgcagctcaagattgttcccaaacgcgagatgcttgccaaattcggtatttccttgccggactttgccgaatttgtatctgtaaacatggcgggtgaagttgtttcgcaggtatatgaagaaggcaaagcgtttaatcttattgtccgtaccaaggacgaggtgcgtgatgagatggagaaagtgcgtaacctgatgattgataccggtgacggtcagaaaatccctgtcaactatgtagccgatgtgatttctgccatgggaccgaataccatcagccgtgagaacgtgaagcgtaagattgtgatttcagccaataccagcggccgtgatttgcgcagcgtggtgaatgatatacaggaacggattgatgcgcaaatcaagcttcccgaaggatatcatgtggaatatggcggtcagtttgaaagcgagcaggcggccagccgtacgctgatgctcacttcgtttatgagtatcgtagttatcttcctgttgctttatacccagtttaagaatgcagcccaaagtggagtcattttgttgaatttgcctttggcgttgattggtggggtatttgcattgatgataacaacgggtgagataagcattccggctattatcggctttatctcgttgtttggtattgctacccgtaatggtatgttgttgataagtcattacaatacgttgcgcgaagaaggtatggatttgaaagaaagcattcttcacggttcgttagaccgtttgaaccctatcctgatgactgcattgtcttccgcgttggctttgatacctttggcgttccgtggcgatttgccgggtaatgagatacaaagtccgatggcgaaagttattctgggaggtcttttgacatcgactttcttgaacgctttcattattccgattgtttatgaactgatgaatcgaaagaagaaataatagaaatatatgaaacgaatcttatttataatagccttctgctctcccttgctggcgcaggcccagagtattgagcacattttgaaaagcatcgagcagaataataaagagctcaaggcgcagaaacatgcagccgatgcaaccaagatggaaaaccggacaaacaacaacttgcctgaccctacagtgagctacagttctttttacagtaatggtgccgaaggggggcacggtacggaacttgtcgcttcacaaggttttgatttccctactcagtatattgtccgcaatcggcaggctactttgcagaacgaagcggtggacaagcaacaacaggctgctcgccgagatattctgctgaatgcgaagaatctctgtctagaccttattctgttgaatcaggaaaaaacattgatggatatccgtatgaaaaatgcagatgaattacaggcactttatgaaaagcgtctgactaccggtgatgcgaacatattggaagtcaataaaatcaaaatggaacgtatgaatgtgcagacggaagttgcccaaaacagcgcagcccaccgcactgccttgcaatctctgcttgccatgaacggcaacatgcctttagaatttgctgaaaccacataccctgccatacaggaaatcaatgattacaatgtcatgcgggatgaagtgatggcatcagaccttgacttgcaggccgccgtcgccactgcccgtgccgccgagaagcaggtttcggtagaccgtcaaggatggttgccgaaactggaagccggttttcgccgtaacacggatgatgcggtttcgatgaatggttttgtggtagggggctccttgcctttgtttcagaatcgtaaaaaggtaaagatagccaaggcacaggctatcagcgcacaattgatgcaagaaaatgctaaagatcaggttgaagcttctctgatgtctctcttcaatgagatgcagcagttgaaggatgccatgaatgcgtatgatgttcctttgatgtaccgttcgctggatttattgaagcaagcattgaccgagggacaaatttcattgattgaatattttgtggaaacggaaaatatttataagaatctccaggcgtatatgcagattgagaatcaataccagaaggtgatggcgaatatttacaagaataatttgtaaagctgacagtctgttcttttaacgcagatagggtaaaaacggatggcaggatggtacggatagtcaacaaactatatccgtgttatcctgctttttcatttaaaaaagcagactgtcgctgtcaaaaatgtaccgaagcggattgtgttttttttgtccgtaatcttccggctgatcaatgttgccgataaggtttctatttcctccagtttcacattatatccgtccgccagatggtctgtcagttggtttcccaggttggctgaatcgtcctatgatgatactctccttaaagccaaagtactttggctagaaattcgaagaatgccggttacgtcctttttttgattcttaataaaagctggaaacgattgtcgttcagaatggcataaaaaatgtgccggaagaattgggctaccttttataacagagtgacttccgacacattttttcttgtttatttctatttatttcttttttttcttggcttctttcgcccattctttcgctccctgctctttcagtttcgcggtgaaagcctttgctttttccatgcttgcgttttcgtcttcgggtgaagcgtatgcatgtttgtaacctttggtcacgttccattcacctcgtgtgaagtccgggaaggctactgccgcacagccgttgtccatagagatagctcccagttcggccagacagcaccattcggccaagtcatatacatccatgtccaaaggcagtccgttttgcagacaatataccagacggctatccatgatgaagtccataccgccgtggccgccgacttcttttgccatttcaccatatttctttaaaataggatgctggtatttctcaataagcgcttccatttctgcctggggtaagaatccgtgagagttcaaatcgtctactttgggttgcacgcccgatgcggtcagttgtgctgcatccaaagcatatccttcaacgggatatttattggcaaaccctttgcttcctgtcagttggtacaagcggttgtaaggttggggagtcattacattatgttggatttcaataactttcccatttgctgtgcgaagcagggtggtggtatggtctccgttgcagaattctttacattcttcgccggttctcttctccactaaatctttaccaacaacagatttggtgtccatagctactaaagtggttatacggtcaccacgatggatatccaatgcttgtgctacaggacccaagccgtgagtggcatatacatcaccccggtgtttcatgttataatctaaacgccatcctagtttgtcttctttgccgtttttccaataatgatcccagaacgggcttaaattgtgaatgtaggctccttgggcacggattatttcgccaaatacaccttgttgtgccatattcagtgtattcatctcaaaccagtcatagcaacagttctcaagaatcatgcaatgcttgcgggttttttcactcaggttgattaaatcccagcattcttgcaggttcatggccgagggaacttcaatagctacatttttaccgttttccaatgcgcattttgctacggggaaatgatgcaaccagtctgcggcgatataaactaaatctatgtctgtacgtttacataattcttcatatcccttttctccggaataaatggcagctttcggcatagatgctttctttaggatatcctgacatttttctgcacgagatgcttcataatcacaaagtgccacaatttgtgtgccgggaatataagtgaagcgctctacggctccgggacctcgcattcccaatccgacaaatcctacgcggactacttccattttcgggatggttaagcctaatacacttttctggccggacggacgttcaggagtgtcaatcacaatggttcctttgtcccatttccaggaatctcctgaacttacggtttgtgctgtcgtggtttgtggtaaacacatgcatagggttgtacccatacataagcttatcatcaatgatttaaaggttctcatactttttgaatttaaagattaaaatttaaaaatataggttgtttcttgagtcaactacttgaaacttaattatatttcacattaataataagaatatttttccttaattccgcaacactattacaaatataactttttaagtacctgagcaacaaaaagttgctcaggaatttgccatgtcagatttttcacctatcttagtgttgcaaatcaaaatatgtatcaaacccgacagacatggcaaaggtagcaattaaatccgagaaactcactccttttggaggaatattttcaataatggagcaatttgactccagactctcatctgtaatcgactcaaccctcggtatgagatgcaggctgtatggttatcaatacagcgaaatcatccgttcgcttatgagcgtttatttttgtggcggctcatgcatcgaggatgtcaccactcatctgatgtaccacctttcgcttcatccgacacttcgcacatgcagtgccgacacgattcttagagccataaaggaactgacccaggataacatttcctacacatccgacactggcaagacctacgacttcaacacggcagacaagctgaatacactgctcctcaattgcctattgtccacagggcagctgaaagagggcgaggggtatgacgttgacttcgaccaccagttcatagaggctgagaagtttgatgcgaagcctacatacaagaagttccttggttatcgccctggcgtggcggttattggcaacttgattgtcggcattgagaacagcgacggcaacacaaatgtccgtttccaccagaaggacacgctgaagaggttctttgaaaggtttgaacaaaacaagcttattatcaaccgtttcagagctgattgcggctcgtgttctgaagagatagtggaagagattgctaaacactgcaagaccttctatatccgtgctaaccgatgcagttcgctctacaatgacatctttgccctcagaggttggaagaaagtggaattgggcggcattgagtttgagctggcctccattctcatcgagaaatggaaagggaaggcataccgtcttgtgattcaaagacagaagcggatagacggcgaactcgacctgtgggaaggagaatacacctaccgctgcatccttacaaatgactacgagtcttccgagaaagagattgtcgaattctataacctccgtggagggaaggaacgcatcttcgatgatatgaataacggattcggctggaacaggcttccaaaatcctttatgggagaaaacacggtgtttcttctgcttatggcactcatacgcaacttctataaattcatcatggcgaggcttgacgtgaagaggttcggactcaaagcaacaagccgcatcaagacgtttgtctttaagttcatctctgtgccagccaaatgggtcaggacatcaaggaagtatgtgctgaatatctattcatgcaacaatgcttatgccaatgtgttccagaatgactttggataacaccgacaacttatagtcgtgattttgcgtattgcctcaagtcgcatggtggggtaaggggcatttatatgtctttatggtgacattcgatgcactgtgccccctttttactaacgatgcagattcttttcgcttctgtatcatattaggcgcgtagttgcggatttgaggttttttatttttgcgctcaaagataattaatcttttttgattatggatataagttcgtcctcttttttctgagaaaaaggtgagttaataaataaaatgaaggaagggaaaaagtgggatcaagacagaagttgtgaagatatgagtgaaaatctaaaaataatcaaggtttgttgattgaaaacgatcaagaaaggaaataatttagtccaaaagatcgtttagtaaggagatttggcgggatttttttaattttgcacttacaactaattaacagataagaaaatgccgttaaatttacccgataaactacctgctattgaattgctgaaggaggaaaatatcttcgtcatagacaattcacgtgccagtgcacaggatattcgtccgttaaaaatcgtgatattgaatttgatgccgttgaagataacgacagaaacggatttggtacgtttgctttccaacactcccttgcagttggaaatatcatttatgaagttgaaaagccatacatcgaaaaatacaccggtggaacatatgaaagcattctatcatgactttgatttgatgcgtggcgagaaatatgacgggatgattattacgggggctccggtagagcagatgccgtatgaggatgtgaattattggaatgagattactactatttttgattgggcgcgtactcatgttacctcaactctctatatttgttgggcggcccaagccgggctttatcatttctatggagttcccaaatatccgctgaaacaaaaaatgtttggtattttccgccatcatatcaatgtacagggattgcccatattccgtggttttgatgatgagttttttgtaccacatagccgtcataccgaaatacaccgtgaggatattctgaaagtaaaagagttggctttgatagctgagtctgatgagtctggggtttatatggctatggctcgtaatgggcgtgaattctttattaccgggcattcggagtattctccttatacgcttgatacggaatataagcgtgatttggggaaagggttgcctattgaaatgcctgtaaattattataaggacgataatccggacaatgccccggtggtgcgttggcgcggacatgccaatttgttgttttctaattggttgaactattatgtatatcaggaaaccccgtttgatataaacgagatacgatgatcagacaacgaaaaatagaattattagctcctgctaaaaatctggagtgcggtattgcagctgttgatcacggtgctgatgccatttatattggtgctccccgtttcggagcacgtgcggctgcggggaattcattggaggatattgctgagttggtgcggtacgctcatgtatataatgtccgtatctatgtgactgtgaatacgattctgaaggatgaggaactgaaagatacggaaaaaatgatttgggatttataccgtgccggagtggatgctttgatagtgcaggatatgggattgttggaattgaatctgccacctataccgttacatgccagcacgcagatggataatcgtacttctcaaaaagtaagattcctggctgaggcaggtttccgtcaggtggtattggctcgtgaactttctcttgttgaaatagaaaatatccatcatgcttgtcctgatgtgcctttggaggtatttgtacatggtgctttgtgtgtaagctatagtggacaatgttatgttagtcaggcttgttttgggcgtagtgccaaccggggggaatgtgcccagttctgtcgccttgcttttgatatgatagacgcggacggtaaatctatagtaaggaataagcatctattgtctctgaaagatttgaatcagagcgaagagttggagcaattgctggatgccggagcttcttccctgaaaatagagggacgtttgaaggatgtatcttacgttaaaaatgtaacagcttactatcgccagaagctggatactattttcaaacgtcgtaaagagtatatccgtgcttcatcgggagaagtgaaattagagttcaaacctcaattggataagagtttcagtcgtggttttactaattattttctttttgacaggaataaggatattttttcttttgatactcccaagtctttaggggaggagatgggaacagtgaaggaaattcgtggtaattatcttaccgtagccggaatcaagtcttttaataatggagatggtgtttgttttttggatgagactggtaagttgcagggatttcgcataaaccgggtggagaataataaattatttcctcaggagatgcctcggataaagccccgtacgatactttatcgtaattttgatcaggaatttgagaggttgatgtcgcgtaaatcagccgaaaggaaaattgctgtcattttaaaattggctgagaataatcggggctttactctgtctctgactgatgaagatgataacagtgtcagtgtggtgctggaaagggagaaggaacgtgcccgtactctgcaggaagataacttgcgtacacaacttggaaagttaggaaatactccatttgaagcatcagatatagtgattgactggtcggacaattggtttattccggcttctatgcttgccgaacttcgccgtaagggaatagagaaactgctggaagtgcgccgtattaactatcggcaggaaatttacaagttgcctcgaacgcatcatgcttttcctgtgaatgaattgacttatttgggaaatgtgatgaatgctgatgctgtttccttctataggaatcatggtgtgcagcgtattgctccggcttatgaaaaggctccggcagaagaagcagtattgatgttttgcaagcattgtttgcgttatagtatgggatggtgcccctcttggcataaagtgcgttctccttataaggaaccttattatctggttagctcggataacaggcgtttccgtttagagtttgattgtaagaattgtcagatgaaagtctatgctgaaaagtaagtacatcggattactgtttttggtattggctattttgatggcttgccaatatccttcacctgttacttcgagtgaggatatgccgcaaaagacaagggattctgtcaattatttggtggaacggcattatacattaaacagtaattttgaggttacttcagattcgcttatgttacagcaactaccattggttgatgtgcttcctgtttttaaaggagaacggctggtggtagcggagtttatgatacaacctgctgatagtgtggattctgtatgggtgaaggtcgcacgggaccaggaaacaatgggatgggtacatgaaaaggaattgttggagaaagtagtccctgtggattcagtgtcacagtttattcattttttcagtaattctcataccatcgctttctttatcatattaggctttttcggtatttggtatgttcatagggctattcgtcgccagaagctgcaattaatttggttgaatgatattgatagcgtttttcctacagttctttcttggttggtagctaccgcagctacgctttatgctagtattcagcattttgttccaggaacttgggagcagttttattataatccttctttgaatccttttagcttgccttttattctttctcttttcatgtttaatatttggggaattattcttgtggggttggctactttagatgatttgtttcatcagacacatattgaagctgcatgtttttatttgttgggattgatgtcctgctgcatctttctatatttgttttttacatttactacgtactactatttgggttatccatgtttattggtatatgctgtatggtcatttaatcgtataaagcacgcttctcggtataaattcagttgtggaaattgcggggcgaagatgaagaataaaggagtgtgtcctcattgcggcgctgtcaatgaataattttattgtttgcttcttttaacaaagactcaagcagttttctatagtaaacagcattttctctatgtacatacactcaaacgaataggtttgttttaggagctattcgcttcatttgcagcaataataaagttcttacttttcttagtgtgacagaaaataaatttgatttggtaaatgtggaaacagaaagggagttctgcgaagaaccccctttttatttttgcaagaatggttagaagtgataacgtatatccacccccagttgtaaaggtctgcttttttgttcgaatcctctatgcatggtttcaaaatagaaggttgtataatccttgttggttaaattacgtccccatacatctatctgtaaagcttctgtctgcaaagaaatgcgcccgttcagtgttccgtaaaaactttgtgagacattgtttttttcagtccaataaatttttcctgctccggtatagctcatgcctaaagtcaggctttgcatccaattgcttttatcgaaaaagaaactataatttgcgcctgcattcatggtatggcggggaacaaatggtacataattgccgctataatcaatttgctcttctgatgatgtagtacctccgtcatattttttgaatgtggaatgagtatatccataacttacattcatattcaggtttttgttgatagatgccagaaagctggcctctactccataactttcgctactaccggcattgaccatcattcgtcccaagccactattgacaaatttggcgatttgttggtcgtgggtatccatgtagaatgcggcaaggtcggtcttcagtttgccgttgaacaaactgagatgtgatcccacttcgtaattccagctgtactcgggcttgtagactgttgtttcttgtacgttcaattcttttccgtagttgggcatgtgttgcttgatcattccttctatcatacctgccatagattctggtgccttgtttagtatggcttcaatcattttttgttgcatgtcactttgtatcagttctgaaaacatctgtacgttataccctccggaacgatatcctttggttatgcttacatacatattgtttgcagggctgaaatcgtatttaaaagctagtttgggaagtagctgtacatagtcgtttttttcttttccttccaatagcggtgtggcattcaaatttctgaatggaatattaaggggaggcattgccattttaagaaagaaatcgaaatcgatattactatccgagaaataattcatagacattttttcatattccaaacgcaaacctgctgttactgaaaggcctttcacaaacaggtcattgaatgtagattggtggtacagtgcggtgctgaataccggtgtgtcaaaacttccacttacgcggatacggttgttcaaaacgtccagactcatttcaggggtacggggattgtctaaatgaattttcttgaaagtattgttgatgttcccttcgatcatatcggtcactccgtcctccatgaagtttaccggaccggtggtatgtagccattgataaaaaccactaactcctgtaacccattgccagcgcttgttgtttttgcttttaaaagtaatctcttcactgatggtattcagacgttgcttctgctcaatagtataaatgctgacaggcaggaaatcctggtccataaacatacggtcatttaaattctgaaatccagtaacagcgcttaagataaacttttgtgcctggtattcaatattcaaaccggtattgaacagtccacggcgataagtacaatcctgatcgtatgaaatcttccctgtgtagtttttatatttttcattctctttgtcgtatccgtctatagctcctgtatagtaataagggtatcctccttcgtcactataatcatagcctatggtaaagtctagttttaggttttctgaaggcagccagatagcatgtattcgtccgcctcccgcttccatattatctacttttttcccattaagagaattgcggaagaatccgtctgagccctcataataaccaccggcggagaaagcaaaacagtcactccaacgatggtaatgggttaatgaaacactgcggtagttactttttgttccataactcagttttacgtctgttccctgataggagaatggagagcgggtatgtactttgattaatccccccatggtattgcgtccgtacaaggttccttgtggaccgcgaagaatatcaatacgttctatatcataaaaattgaaatcaaatgcagatttgtcaatgtaagggatattgtccacatacaaacctaccgcaggagtgttgatacgcgaaccgattccccggatataaatagctgaggtgagtcttgaaccatagtcgggcataaagaaattgggtaccagtgaactcacgttctttaaagttgtgatttggtttgcttgcatatctttttgggagagtaaagatacggctgtagggagttcccttaattttccggtttctttaggtgaagcgataaccaccacctcttctatatcaatgactttcgtagtgtccttaggcagcgtgttgatattttccgcaaaagttgttgtagccagcaggcaggatgtaatgaataaaatgttttttctcatatttattgtttggttttatttgatacatcacggatgaccagagttgttacaagtttctaccaggcggaaaatttatacattccactctgtataatccatgatggagaatgattccggctgcaaagtaacggtaaacctgatatgtgtgcaatcctaataaatgaggattttatattctgtctgcctcaatgtaaccgttcatcacagcatagacagttagcccggatacagatttgatacccagtttttcggtaatattcttgcggtgggagatgacagtggtcaggctgatatgaagtttgtctgctatttccttattgataagtcctttggtgataagtatcaatacttctatttcccggatagacaattcatgttctgttttttctatatgcattgctttatctactgcttgttttcttgcctgatgtccatattggcgtaattgatggatgtcttttatcaaagaaccttcatcttggtagatattcagcttggggataccggataattgaggttggttgtcacctcctgctaatacaattgtttttggtttacgaagtaaaaagaaggaagtatgttcaaaatagatttgggcagaaataaaatagtgggcatacatgtccggtgtgtcatccgtcaactcaccaaacgaatggaatacacggatagtagccattggaatgatatcttccaaaatgttttttaaccccagacaagtaagggtatttggatctactatggctatttcgggatgatgcataatgctttctttggtgcaaagatacatatcttttagaaaaaataggttcataaagatgaagaaatcttcttttggacaactaagtccctcacttatttgttgttagagtatataaagcttaaaaccttaacaatatgaaatatgatatagcgataatcggtgggggacctgccggatatacggctgcggaaagagctgctgccggaggattgaaaactgtgatttttgccttaattccgcaacactattacaaatataactttttaagtacctgagcaacaaaaagttgctcaggaatttgccatgtcagatttttcacctatcttagtgttgcaaatcaaaatatgtatcaaacccgacagacatggcaaaggtagcaattaaatccgagaaactcactccttttggaggaatattttcaataatggagcaatttgactccagactctcatctgtaatcgactcaaccctcggtatgagatgcaggctgtatggttatcaatacagcgaaatcatccgttcgcttatgagcgtttatttttgtggcggctcatgcatcgaggatgtcaccactcatctgatgtaccacctttcgcttcatccgacacttcgcacatgcagtgccgacacgattcttagagccataaaggaactgacccaggataacatttcctacacatccgacactggcaagacctacgacttcaacacggcagacaagctgaatacactgctcctcaattgcctattgtccacagggcagctgaaagagggcgaggggtatgacgttgacttcgaccaccagttcatagaggctgagaagtttgatgcgaagcctacatacaagaagttccttggttatcgccctggcgtggcggttattggcaacttgattgtcggcattgagaacagcgacggcaacacaaatgtccgtttccaccagaaggacacgctgaagaggttctttgaaaggtttgaacaaaacaagcttattatcaaccgtttcagagctgattgcggctcgtgttctgaagagatagtggaagagattgctaaacactgcaagaccttctatatccgtgctaaccgatgcagttcgctctacaatgacatctttgccctcagaggttggaagaaagtggaattgggcggcattgagtttgagctggcctccattctcatcgagaaatggaaagggaaggcataccgtcttgtgattcaaagacagaagcggatagacggcgaactcgacctgtgggaaggagaatacacctaccgctgcatccttacaaatgactacgagtcttccgagaaagagattgtcgaattctataacctccgtggagggaaggaacgcatcttcgatgatatgaataacggattcggctggaacaggcttccaaaatcctttatgggagaaaacacggtgtttcttctgcttatggcactcatacgcaacttctataaattcatcatggcgaggcttgacgtgaagaggttcggactcaaagcaacaagccgcatcaagacgtttgtctttaagttcatctctgtgccagccaaatgggtcaggacatcaaggaagtatgtgctgaatatctattcatgcaacaatgcttatgccaatgtgttccagaatgactttggataacaccgacaacttatagtcgtgattttgcgtattgcctcaagtcgcatggtggggtaaggggcatttatatgtctttatggtgacattcgatgcactgtgccccctttttactaacgatgcagattcttttcgcttctgtatcatattaggcgcgtagttgcggatttgaggttttgaaaagaaagccatgggaggtgtttgtttgaatgaaggatgtatccctacgaaaactcttttgtattcagcaaaattattggataatgcaaaaggtgcggcaaaatatggaattgctgtaccggatggaatcagcttcaatttggagaaaataatagaccgtaaagataaagtggtcaagaaactgaccggaggtgtaaaacagactgtgaaatcttatggagccgaattgatagaaaaagaagcggttataaccggagaagataatggactgattcaaattttagccggaggagaaaaatatgaagtgacttatctgttggtttgtacaggttcggataccgtgattccacccattaaaggcttgtcggaaatagattattggacttccaaagaggctttggaaatggctgcattacctaaatcgctggctattattggtggcggagtaattggaatggaatttgcttctttctttaatagtatgggggtaaaggtgagtgtcattgagatgatgcctgaaatattaggggctatggacaaggaaaccagtgcgatgttacgtacagagtatcagaagcgagggattaacttccaattgaattctaaagtgattgaagtcagtccggcaggagttaccatagaaaaagccggtaaattatcactgattgaagcggataaggttctggtaagtgtaggcagaaaagcgaatctgaaccaagtggggctggataaactaaaagtggaaatggtgcgtaacggtgtaaaagtggatgaacacatgcttacttcccatcctaaagtctatgcttgtggagatataaccggatactccatgttggctcatacggctattcgtgaaagcgaagttgccattaatcatattctgggagtggaggaccggatgaattatcattgtgtaccgggggtggtatatacgaatcctgaactggccggagtgggaaaaacggaagaggagttgaaagcatcaggaactagctatcatgtacagaaattaccgatggcttattcggggcgtttcgtggcagaaaatgaaacagggaacgggctttgcaaattgattttggatgaggaagaccgcattataggttgccatttgttgggaaatcctgcttcggaaataatcgttgtagcggggattgccgttcaatatggatatactgtagaagaatttcaaaaaacggtatttccacatcctacggtaggcgagatttatcacgaaacactttttgcataatgttttgcatagataaccgctgtacggatgtttatttcaatttggcagtggaggagtatcttttaaagcagacacagggggattattttgtaatttggcagtcggaaccttccgtggtcatgggcaagaatcagtctgttcgtgccgaggtgaatgaggattacaggatagagaagggcattcgtttggctcgtaggttttcgggaggtggtgcagtttaccatgataagggaaatattaatcttacttttatagaaacgacatcgcaacccctgtttgaagactatttgcagcgtattgttggttttctggaaacgatgggagtcacggcctatacggatgagcgtttggggatttatctggatggaaagaaaatatcgggcagtgcgcaatgtattcataaaaaccgtgtgatgtatcattgtactttgttattttctgcaaacttggatgtacttcatacagtgttgaaggggaagtctgatgaattggagtcgattcccggattaaagaatatccgtgccgtaccgtctgtacctagtgaagtggccaatctcaattgttttttggatgtttcggtgaatatcaaacggtttattcatcttttgtttcattacttcttgatagaagatgaaaagaatagcatttatcatttttcccgaaaggatttggcggcaatcgagttgctgaaagtagaaaaatatgctaatgaggattggatacatcaccgggtcaccttaaaaaagatttaagttaaaactttctttttcagtggcttgttgttcatataaaaggattaaaaaaataaaattatcaatatgtcaagatttgaaataaaaatgcctaagctaggcgaaagtattactgaaggaaccattatatcctggtcggtaaaagtgggtgatactgtccaagaggacgatgtcttgttcgaagtgaatacagcaaaggtcagtgctgaaattccatctcccgtagaaggcaaggtgatcgggatattatttaaagaaggagataccgtacctgtaggtacagtagtagcaattgtagatatagatagtgatgaaggaataggagaggctcttgtagaagagcaaaatgtaccgcaagcagaagaaacgtcctcccatgtaccatctgtaacatctgttcaggaagtaaaggaagttcctaaggcaatagcggctaaaacagaagaagagcgttggtattcccccattgtacttcagctggctcaggctgcacatatttcgaaagaggaattggatcgtattcaaggaacaggatatgaagggcgtctgagtaaaaaagatataaaagcttatattactagaaaggaacaaggtaacataaccgtaactgaacctgtatctgcatccgcccaatctgttgaggctgtttctgtccggacttctccaactgcgccatcatcggcttcctctttaacactcccagtttccggttcgcaagaaggcgtggaagtgaaagaaatggatcgtgtccggaaaatgattgccgatcacatggttatgtctaaacatacctctcctcatgttacgaatgtggtagaagtggatgtgaccaaactcgtgaaatggcgtgataagaataaagaggctttcttccgtcgtgaaggagtcaaattgacttatatgcctgccataaccgaagccgtaacgaaggcattggttgcctatccgcaggtaaatgtatctgtagacggttataatgtcctgtttaaaaagcatatcaatgtcggtattgctgtttcactgaatgatggaaatctgatagttccggtgatacatgatgccgacaggttgaatttgaatggtttggctgtgaccattgatactctggcggtgaaagcgcgtgataataaactgatgccggatgacatttcgggtggtacgtttacgattaccaattttggaactttcaagtctttgtttggtactcctataattaatcagccgcaggttgccattctcggtgtgggatatatcgaaaagaagccggcagttattgaaacttctgaaggcgatgtgattgctgtccgtcataaaatgtatctttctttgtcatacgatcatcgggtggtggatggtatgttaggggggcaattcctctatgcgataaaagattatctggaaaattggaaagaataaccattcatcacagtaaaaaaataatataatgaaaaaatatgatataaagaccactgataccgaaacgttgaaaaagtggtatcatttgatggtattgggacgtgcgcttgatgaaaaagctccgtcttatctgttgcaatcattgggttggtcctatcatgcgccttatgcggggcatgatggaatccaattggccgtaggtcaagtctttaccaaaggagaggactttctttttccatactatcgcgatatgctgaccgtgctttcggcaggcatgagtgtggaggaattgatattgaatggcatttcgaaagcaactgatcccggcagtggaggacgtcatatgtccaaccactttgctaaacccgaatggcatatagaaaatgtgtcgtccgctaccggaacgcatgaccttcatgctgccggagtggcgcgtgccatggtgtattatggacataagggggtggcgatcacttcgcatggagagtctgcttcttcggaaggatatgtttacgaggcgattaacggggccagtagggaaggccttcctgtgatatttgtatggcaggataatgggtacggtatctctgttcccaaaaaggatcagacagttgcccggaagtatgctgataatttttccggttttaagaatctgaagattattcattgtaatggcaaagatgtgttcgactcgatgaatgccatgagtgaagcccgtgaatttgctatagcccatcgtactcctgtcattgtacatgccaattgtgtccgtattggttcccactctaattcagataaacagacgttgtatcgggatgaaaacgaattggcttatgtaaaagaggctgatcctttgatgaaattccgccggatgctgttgcgttacaaacgtcttacggaagaagagttgcaacagatagaagcagcggcaaagaaagaactgtcggttgctaaccggaaagcacttgcagcgcctgatcctgatccgaaaagtatctttgattatgttttgcccgatccttatataccggaaaagtataaagagggacttcatcaagaagaaaatggtgagaaggcctttatggtaactgctatcaacgaaacgttgaaagaggaattccgccataatccggatactttcatttatgggcaggatgtagcgaataaagagaaaggtggagtattcaatattactaaaggaatgcagcaggagtttggggatgcccgcgtgtttaatgctcctatagcagaggactatattgtgggtacggcaaatggcatgtgccgtttcgatcctaagatacatgtcgttattgaaggagctgaatttgccgattatttctggcctgctgtggagcaatatgtagagtgtactcatgaatactggcgtagcaatgggaagtttgttcccaatattgtattacgtctggcctcgggtggatatattggtggtggactttatcattctcaaaatatagagggtgcattagctactttgccgggggcccggattgtttgcccttcttttgccgatgatgcggccgggttgcttcgtactgcgatgcgctctcgtgggtttactttatatcttgaaccgaaggccttgtataattcagtagaggcttcttccgtagtacccgaagattttgaggttccgtttgggaaggcgcgtatccgccgtgaaggtacagatttaagtatgataacgtatggaaatacaactcatttctgtttgaatgtggctgaacgcttggctcaagaggggtggagtgtggaagtgattgatcttcgctcgcttattccactggataaagaaactatttatgcgtcagtgaagaaaacaagtaaggctttggtggttcatgaggataaagttttctctggtttcggagctgaaattgctgccggaattggtacggagctgttccgttatctggatgctcctgtacagcgtgtaggttctgttttcactcctgtaggtttccatcctatattggaaaaggctattttacctactgaggataaaatttatgatgcagccaggacactgctggaatattaatcaaatgtccacaggttacatggaccgttttatatgttgtccgtgttaatctgtggtgaataaaaaagaattatgaaaacaataggattattttatgcaatgaatgcagccaagacttcccatatagctgaaaagattcgggaagatttgggaggagtgaaagtaatagaagtcgttttgatagaaaaggcttggcagaatgattttcaagcgtatgacaatatgatagtgggagcgtcaacttggtttgatggtgaacttcctacttattgggacgaactggttcccgaattggagtcgttggatttaaagggaaagaaagtagcaatattcggtttgggggatcagaagaactatcctgataattttgtggatggaatggggattttagcagatgcttttcaaaaggcgggggctgagttggtcggttttacttcgacagacggatataccttcaaccaatcgagggcagtacgtggtgaaaaattctgcggtttggtaattgaccaagaaaatcaggctcaattgaccagtaaacgtattgctgattggtgcaagctgataaaagaagactttacttccaataagaaagaataataaaataatatcgcaaatcatttatttactgtaggggcgcatttaatgcgcccaaatgtatacagtaaatcattttcggacagattcaatcctcctctatacctaaataagtggcaacggcttccgcacatctttctccatcaatacctgctgaaacaattccgccggcataacctgccccttctccacaaggaaataacccgttgatagtgacgtgttgcagtgtctcgttatctcgcagaatccgtaccggagccgatgtgcgtgtttcgacaccaatcatcgctgcttcattggtcagaaagccatgactgcttttcccaaattgttggaagcctttgatcaaacggctggtgatgaatgtgggcatccaaaaatgcagaggagaggaaactaatcccggactatacgaactgtcaggtaaatcatagcttagttttttgcgggtgaagtccatcattcgttgtgagggtgcggtttggcgcatattgccttgttgccagcaggtggcttctaatgcctcttgaaaatacatcatggttaatggacaatggccggtagtccattgaccattatttttattcgtggcttttaattcttcacttttcgtttttaattcttctgtaaaaagactattgtccgacaggtcttccggtctgatttctactaccattccggaattgctccatttggagccacggttgctgggactcatgccgtttactacaatttgatgcggaccgcttgcggcgggaactacgaatcctcccggacacatacaaaaactatagactccacgtccttctgcttgtgtcacaaagctatattcggcggcaggcagatactttccacgtccgtttttattatgatattgtatctggtcaatcagcatggacgggtgttccagacgtactcctaccgcaatacctttggcttccatttctacaccattatcatacaaccactgatatacatcccgtgcggagtgtccggtagccagaataacaggtcctttgaaagtctttccggtatttgtctctatacctgtgattttgtttttttctatgataagggaatccattcgtgtttcgaaatgcacttcacctccacattctatgatggtatttcgcatgttttcaatcacgcgcggcaacttgtccgtaccgatgtgcggatgggcatctaccaaaatggaggtactggcaccatgttgacagaatacattcagaattttgtctacattaccccgctttttgcttcgggtatagagcttaccatctgaataggctcctgctcctccttctccgaaactataattactttcggagtcaactttgtgctcacggctgatacgggcgatatctatttttctatcgcgtacattttttcctcgttccactacgacaggccgaagtcctaactctattaatcgtaaagctgcaaacagtccgcccggacctgctcctacaactatgacttgtggctttccttctaccttattgtatatagtgcggataaattcctcgtcctgcggaacttcattgatgtacagacgcactttcaggtttacatagatagtacgctgacgtgcgtctatgcttcttttcaggatacgaagggcatggatggtacgtatatccaatcccttgtcacgtccgatgaattgtttcagtgactgttcattagctgcttgttcaggcaagactcttatttgaaattcttgtatcatggttcttgtttaggttattcgccttccggcattaattttttgcgataataggaattggcggtatataatgcggcggcaggattgtgtcctgtcacacggtctttggtcaccaaagttgtagtataggcattagagtatttgtagaacaggctgtcatgtcctacgcacagtccgatcaccacatttaactctgtatgtgcttggttgagaagacgtgcttgcaggatagggttacacatagcagcaccgatattctcacattctttggggattccaatagaggatttggctgctccggctactttgcagattactgagtaaacctcaaagccgttagcacggaggatacgggcaaaaatacgggcttcatttaccaacccgatacaataagcaattcctattttttgatatcccatctttcgtgcaaaagtcatgatttcttccacacgggttaaccggcaataaccttcatattccacttcggcactggccaccattacgttgtggttttcgttatatcgtttcaatgcccattccaagtcttcttgttccaaatgggttgtcaggcaaaattcggggtaggtgcgctctttgaacttgcagttctgtgtgccgcaatctacgcaggtaggggtgtgagatttatcttttgtcattttatatcattcttcaaattaagtcttaaaggagaaaatagatttttatccaaacaaggcccggaatgcttcttccacttttctgaccggaataatttctattttcaattttgatgtatccattccttgtaaattatgttttggtataaggattcgtttaaagcctaacttttccgcttctccgattcgctgttcaatacggtttacaggtcggatttcaccacttagtcccacttctccggccatgcaggtatcgcgttctacctctgtatccatattgctggatagaatggcactgatgacagacaggtcgatagccggatcattcactttcaatccacccgcaatgtttaaaaagacatctttttgtgccagtttgaatcctactcgtttttcgagtactgccagaagcatattcatacgtcgtaaatcaaatccggtggcagaacgttgcggatttccatatacagccgaactgactaaggcttgtgtttcaattaagaaaggacggacaccttctatggcagaggcgatagcgactccactcattccgtcatggtcttggctaagcaacagttcggacgggttgctcacttggcgcaaaccattttgccgcatttcataaatgcccagttcggcagtgcttccgaaacggttcttgatgctgcgaagaatgcggtacatataatgttggtcaccttcaaattgcaatacggtgtctacaatatgttccagtactttcggtccggcaatgcttccttctttattgatatggccgattaagatgaccggcgtatttgtttctttggcaaatttcaaaatagaggcggaacattcacgcacctgtactaaactgccgggagaagagtctattgtttcagtggagatggtttgaatagagtcgatgatgacgagatcgggttgtgtattctttatatgtatataaatctgctccaatgaagtttcacagacgatcaggcagtcggaagaattatgcgggatacggtctgcacgtagttttaattgtcgtgcactttcttctcccgaaatatacaatacttttctgtcaggcagatgaagtacggtttgcaacaccaaggtagatttgcctatccccggttcaccacccagtaaaacgagtgagcccggtactaagccacctcccaatacccggttcagctcttcgtcttgcatatcaattcgaggctcgtctcctccggttatgtcattcagtgtgacaggcttgctttttacgggttccagaccggataccggtcttttatttgcaggttccttgcgtacaacttcttctacgtatgtgttccatgcaccgcaagacggacatttccctacccatttgggtgaatcctgcccacagttggtgcatacatatacagttttttcctttgccatattcttacgggataattaaaacagcacaacttgaggctgaatttgtacaaaggtaaggaaatagttctgcataccaattatgggccagataaaaaagtattaaaggttttttctcttttcagaagtagctggatgtttcaggcttttcaaggctgctttcttatcgaaatgaaaaatacctgaacaaatggaaagattattccgttttagttattaagacgtcttataaattaaagaactaaaaaataaaactgaaatgaagcgtatattctttttaatattacttgccgttatgtcaaccggcatatatgctcaaaccgatgataaaggatataaggaaggggcatgggtactgaatggtgttaccggtctgaatttgtcacaaaccgccatgactaactggtcggccggtggtgagaatgccttatcgggaaacgcttacctgaatggttcgttgactcataaaaatggaaactggctatgggtgactaatctgatattggattatggcctgtccaaaacaaaatcgcagggaatgagaaagactaccgataaaataggcctttctacccaattaggatattctactaataatgtatggtattatactttaatgggagacttgaatacacaatttgccaaaggatacaactatccggacaagactcactatatttcgaacttctttgcaccggcttattctaatatctcattaggtatggagtatcgccctaagagtaactattctgtttttctttctccggtttctgcaaaaatgacttttgtggaagatgattatctttcggagataggagcttttggtgtggatccgggagaccgtttcaaaatagaatgcggcgcttatctgaaaggcagggccgagatgccacttatggaaaatgtgagcatgattacaacagccgatttctttactccttacagtagccagtttggtaatgtggatgtaaattgggatgtattgatcagcatgaaaattaataagtttttgtccgccaccatcaatacgactttgaaatatgataatgatgtgaagacttttgaagaggatggaactaaaagaggggcgaaagttcagttcaaagaaatattgggggtaggtgttgcttataatttctgacgggggatagtttcaccatagattacacagattcacagattatgtggatttataacggttcacacggattatgacgattgatactaaagagttgggtcaactaaatctgtgtgaatctgtgtaatctgtggtgaatcctcctgtttttccttctttttcaccgctattttgtcttatttctgccttaataaaaagtattcttatattttatcgcaaaaaaatgggaaattgtgatagattgtaggaaattgtttttatatttgcatcgttcaaataaaaaacagaagaagaacaattataaaatgacgatgtactatctccatacaaccaccacattagggatggggcacatgacaactacaatgtccacatccacaacaatgacccctcggggttaaggatagtatatgtgtttctacgtgatacacgcttacggacgtaagcaaaacaagcttttaattttatttttttagtgtaaacagaaacagtttcttttcgttgtcatgctgagtgaaacgaaagtagattctttaccggacttgaaatggtgagaagggcagaatgacaaaagaagctgggacaaaaatagataattgcatgaaagttatgaaattcggcggaacatccgtaggttccgtgaacagcattttaagtgtcaaacagatagtagaggcagttgaagagcctgtaatcgtagttgtatcagctttgggtggtattactgacaagttaatcaatacttcgcagatggctgccaatggggattccgcatacgagaaagaataccgtgaaattgtgaatcgtcatattgaaatggtatataccgtaattcctgcaggtaatgagcgtactgttttattggataaggtcaacgaattgttgagtgagctgaaggatatttttcagggaatttatctgataaaggacttgtcgtctaaaacgtcggctactattgtaagttatggtgagcgcttgtcgtctattattgtagcttcgttgataaagggtgcggtatggtatgattcacgcaacttcattaagactgaaaaaaaacatgccaagcatattctggattccgaattgactacttgcttggttaaagaagcttttcagaaattaccggaagtggcattggttcccggatttatttctactgataagaacagtggtgaagtgactaatttgggacgtggcggttcagattataccgcttctgtcatagctgcggcactgaatgcggatagcttggaaatatggacggatgtggatggtttcatgacggcggatccgcgtgtaatcagtacggcctataccattaatgagttgagctatgtggaagcgatggagctttgtaactttggagcgaaagtggtttatccaccgactatttatccggtatgtcataagaatatccctattctgattaagaatacgttcaatcctcaaggcgagggaactatcataaagcaggaagttaattccggttctaaagccattaaaggtatttcatccatcaatgatacgagtttgattacggttaccggcctgggaatggtgggagtgatcggagtgaatttccgaatttttaaagcattggcacaaaacggaatcagcgtgtttatggtatcgcaggcatcttccgagaacagtacttctatcggtgtgcgtaatcaagatgcggcgctagcttgtgaagtgctgaatgaggaattctccaaagaaatagaaatgggggaaatcagtccggtagttgccgaaatgaatttggccaccattgctattgtcggtgagaacatgaaacatacaccgggcatcgccggtaaattgttcggaactttaggccgtaatggtattagtgtgattgcttgtgcgcaaggtgcttcagaaaccaatatctctttcgtggtagaatccaagtcactgcgcaaatcattgaatgtgattcatgattcgttcttcttgtccgaatatcaggtgctgaacctttttatctgcggtacaggtacggtaggaggcagtttgatagagcaaatccgttgtcagcaacaaaagttgatgcaggaacgcggtttgaagctgaaagtggtaggtatagccgatggacatcatgcattgtttacccgtgcaggcgtagacttgtcacagtataaggaagagttggcagagaaaggaatgccttcgtccacccaggtgttgcatgacgagattataggtatgaatatattcaactctgtgtttgtggattgtacagccagtgcagaagttgcatccttatataaagattttctgatgaataatatttcggtggtagcagccaacaaaattgctgcttcttccgaatactccgtttatagtgaactgaaacaaatagcccgtcgtcgcggtgtgaaattcttgtttgaaaccaatgtaggagcagggcttcccattatcaacacaattaatgacttgataaacagtggagacaagatcttgaaaatagaggcggtattgagcggtacgctgaattatatctttaataaaataagtgcggatattcctttcagtaagaccataaaaatggcacaggaagaacgctactcggaacccgatccgcgtattgacctgagtggcaaggatgtaatccgcaaattggttattctggctcgtgaagccggatataaattggaacaggaagacgtggaaaaacatctttttgtaccgaatgatttctttgcaggctcattggaggaattctggaagaaagtaccttctttggacgcggattttgaatcacgccgtcaaaagttggaggatgaaaacaaacgttggcgttttgtagccaaactggaaaatgggaaaggcagtgtgtctttgcaggaagtagacagtaaacatccgttctatggcttggaaggcagcaataatataattctgcttacaaccgagcgatacaaagaatatccgatgatgatacaaggatatggggccggtgccagtgtgactgccgccggagtatttgccgatatcatgagcatcgctaatatttaggcttatgaaacatattattattttaggtgatggtatggccgactggcctgctgaatcactaggaaacaaaacattgctgcaatactccagtacaccctatatggataaattagctgctatgggacgtaccgggagattgattacagtcgctcccggatttcatccgggtagtgaagtggcgaatatgtctgttatgggctataatttaccgaaagtgtacgaaggtcgtgggccgttggaagcagcaagcatcggggtggagttgcaaccgggcgatatggctatgcgttgtaatattatctgcatcgaagatgagaagataaaaaatcactctgccggacatatcactaccgaagaagctgatgtgctggttaaatatttggacgagaaattgggttctgaccggattcatttctataccggtgtacaatatcgccatttgttggtgataaaagggggaaataaacaattggactgcaccccaccccatgatgtacctttgcagcctttccgtccgctcatggtgaaggcggaagtaccggaggcgcaggaaacggccggattgattaataatcttatcctggcttctcagaaattattggcagatcatccgattaatcaaaaacgtatagccgaaggcaaagatcctgctaatagtatctggccttggagtccgggctatcgtccgcagatggaacctctttccgagaagtatccggccatacagaaaggatctgttatttcagcggtggacttaatcaatggcataggacattatgcaggattacgccgtattgctgtagagggggctaccggtttatataatacgaattatgagaataaggttgctgcggcattggaagcattgaagacggacgactttgtgtatctgcatattgaggccagtgatgaggccggtcacgaaggagattttaagttgaagcagtttactattgaaaatctggataaacgtgctgtaggacctatttatgaagcagtgaaggattgggatgagcctgtggctatcgccgtgcttccggatcatcctacgccttgcgaactccgtacccatacggccgaacctgtgcctttccttatctattatcccggtatagaaccggactgtgtgcagacctttgatgaagtggcatgtgtggaaggcagttatggaatattgaaagaagatgagtttatgaatgaatttatgaaaaaataatgtggcagtttgctaatttgccccaatggcaatcctccatgtaaagcccttggcacattagcacattaacacattgaaaaattgtttactatgaaatattacagtacgaatcaccaggctcccgatgcttctttggaagaagctgtagtgaagggactggcttctgacaaaggtttgtatatgcccgaggccatcaagccattgccgcaagagttttatgatcagattgagaatctgtcgtttcaggaaattgcttatcgcgtggccgatgctttcttcggtgaggatgttcctgctgaaacactgaagcagatagtttatgatacattgagttttgatgttcctgccgtaaaggtaaaagataatatttactctttggaactgtttcatggtcccacattggcatttaaagatgtaggtggacgtttcatggcccgtttgttgggctacttcattaaaaaagaagggcaaaagcaggtgaatgtactggttgcgacttcgggggataccggtagtgctgtagccaatggcttcctcggagtggaaggtattcatgtgtatgtgctttatccgaaaggaaaagtcagtgaaattcaggaaaagcagttcacgactctgggtcagaatattacagcgctagaagtggacggtacttttgatgactgccaggcattggttaagaatgcgtttatggatgctgacttgaatgcacacatgaagttgacttctgccaactccatcaatgtggctcgtttcctgccacaggcattttattacttctatgcctacgcgcagttaaagaaagaaggaaaagcggatcatctggtagtatgcgtacctagcggaaactttggtaatatcaccgccggactatttggtaaacgcatgggcttgcctgtcaagcgttttattgcggccaataaccggaatgatattttctaccaatacttgcagaccggaaaatacaaccctcgtccttccattgctactattgccaatgcaatggatgtgggagatccaagtaattttgcccgtgtactggcattgtatgataacagtcatgctgccataacagcggatatctctggtgcgacttatacggatgaacagattcgtgaaacggtgggtgaggtatatcgggaaaccggttacttgctcgatccgcatggagcctgcggttatcgtgctttatccgaaggattgtccccctgcgaaacgggtattttcctggaaacggcacatccggctaaattcctggaaactgtggaaggcatcattggcgacaaagtggagattcccaccaaactgcaagcgtttatgaaaggaactaaacaaagtattccgatggaaaaagactttgaaagtttcaaaggctatttgatgaaagaatagcttttagaaattctgataagagagggggccaaaagtccaaagtaactatccaatggtttaccgtgggggcggattgaatagttactttgggcttatttacataaagaacaaaaaagttccgtcacagcaacatgctcattactaaccattttctgtgtgaaggtttctcaaatccctctcaatcggtggtatgcttccggctatcgaatcctgttacgtatgtaacaagagcctattcctatcatattttcactccgttccatttgatatttcacctgggtgaagcaactgtttcacctaggcggaaacggctgttcacctaagtgaaatcgcctcttcactcgggtgaagcaacaaatgcagatggacaaaaatacgccttatgacgctcccctgcaaggaagcaaccgcaactatgacacagggattagaacaaccaatatacgtcaagtagaatttggcagtggagaatggcaaaccgtttcaggggaatttagaatatatttgcacagcatgtcgttgatttacagaaagatactgtgcataattcggaatgattgatgcgtgtctttattttatttcttccagcaactttccgaacgaagtgaatgtccgatgtttcccgtcccgggtgaggtacaaggcatcgggggcgatgacttgtagatggggcagaccggcaggagcgtttttggcttgcagacaagtatatccgtgacggttcagtgcgttgatagtccagtgcagcaaggtttcatctgtcgcttccaccgttatttcctgctttccattcacggttggatagtagatgccgtgatcataatcgaaccggatattactgtgtgagaataagttgtccatctgatggcttagaatcatatcttccgtcactccacattgcaatcctttctctttagacaacagccaaagcttgtccgacaggactagagcttgttctatatcatgggttgatagcagaatagccttgttttgttccacggccagtctgtgcagtaaagtcatgatttctatccggcttactacatccagaaaggcggttggctcatccagaataatcagtggacattcttgtactaatgctttagctatcattactttctgtctctctccgtccgaaagttcggctgtataactttgtgctttgtgagtgatgcctacggcatttagggcttcttgaatgatggcatggtcatgccggtgcaatcttccgaagaaccccgtgtgcggctggcgtcccaaagctaccagttcatacacggtcaatcctcctgcttgggtcttgtccgtcaaaaccacgccaatggtacgggagcgttctttttccgaatagtgttgtaaaggtttgtccagtaattgtaaatctccggctaaagagggttgtgaggcggataatgtacgaagtaacgtcgattttccggctccgttggctccaagcagactggtcagttctcctgggtaaagctcgaaagaaaggtgttcgtgcactttcttctcttctttatgggtgcgataacctatacataggtctgttgcggtgataacagcttgcttttccattagttgaaatactggattttacgttggttcacaatgacataaataataatgggcgcaccaatgaccggggtgacggcgtttagcggaatgatacctgcttcgcccggcaaaatacagataaagttacaaactagtgcaatcactccgccggtcagcatagtgacgggcagcaaggaattatgattggatgttcccaacatcagacgggcgatatgaggtacagccagtccgatgaaagaaatcggaccgcaaaaagcagttgttattgctgtcagtattccggtggcgataagcagcaggttgcgtgtacggcgaatgttgattcctaggttttcggcatagcgtgtgcctagcagcaaggcattcaggggttttatcaagagtatggtaatcagcagccctgtcgctgtaaccagagagaaaaagggaagctgttgtaaagatactcctccaaagtttcccattccccaaatcatgtaggaatgtactccttctgccgtggagaaaaagttgagcagggagatagcagatgaggtgatgtatcctatcatgatacctataataagcagcataatgctgttttttatcaaagtggagaagaatagaatgattcccatcactatcatggatcctataaacgctccgataatgacggaaataaaaccggataaagtaaatactccggcggtgattgttcctgcacctgccagcatgaccagagcaactcccagacttgcccctgaactgatgcccaagatggaaggatcggccaggggattattgaaagtcgtttgcaacatcagtcccgatgaggctaacgccattccacagagtaaagccgtaaccgcttgcggcaggcgggattcccagacaataaaactccaactcgccttttctacttcattgcctgtaaggatatgccacaccgcctcggcagggatgtttaccgaaccgaacaacaggttggctcctgtcaatgcaaggatgaggaggagcagtatgataccgtatttcgttcctttattcttcaaaatcactccgctaatttagtgaaatattttaattcatacccttctaaaagcgtaggatggaatatttttatcaaatctttcagcaaccggtcgggatggaaaggggaatcttcgtaaaagtctaccttccctgtgttgcatccataaatgttgcgttccttgaatgcgcggaaaccggtgtatggagcatagtcctgctccaattccttataagtcttgtcaatggcctgattatatttgatgagccaaaagtctgcattctgccctttgtcaaacacggtttcgaaggctaggggaacagaaccgctatgctcgtcatcggcaaacacataatttgccccggcatccgcataaatccgtgcggaagtgcttttccctcccggaacataccatgccgaaccgttctttagttcgctgataacgctcggtgcagatgaaaggggagcaaccaatgctttcagctcattatagtttttttccacctcggcaaacaagttgtccgctttttgtgcctcaccgaacagaagaccgtagaaacgcatccattcggcacgtcccaatgctgaagtttccatgtagtctgcacattcgataatggggatgttgagtttctccacccgtccgtatccgccactgttctcaaaaggggagagcataatggcatcgggatgcaggtcgattatcttttctatatccgggttcattccattccctacatcggcgatgcttcctgtgcggcagccatcctgcacttcttgcagtttgatatacttcaaatcgcagactcctccaatacttttcaatgcaccaatctggttgagcaatccgcaatgtacggatgagtaaacaatagctttgtttaatggggtacggacaagtgttccttcaggcaaatcagcaggaagagatctttctttgtcaaccattatataagtatgtagtatttttgtcgtatcccacggattacgcagacgggctatggtatagtcttcggttgcagacaggctgaggttttctgcataacgcaaagggattgctttttctgcttctattacagaagaactcttgctttttccgccgcaggaggaaagaagggcaagtaagaagatgaataggattacttgtttcatgttattttttataatatccgccggttttacgggaacctttgtattctattaattctttatctttcagtgatcgtaaataacgctctgtcgtagcagctcctttttggatatattctgcaatttcatatccttttgcaccgggtttcttttccaagaaggtgaggataaggctttcaagttcgtttattccctcatttattccctcatttattcccttatttattccctcatctttgtttactccctcatcagcgattctgtctattactgaaatgaactgcatacctaccggctcattaatgaattttatattcggctcttcttgaagtgcacgtataatccccgagcccagcccgcgataaggcatcgttttagcacagaaattagcaatgaaaggattgcgtactacggcgcttcccagtttgatgctttccaccgtcagcccatcgggaaggcatcccgggctgataatctctacacggttatcaaaaatgagtaatcttatcggtgcattacgcgtataatcacgatgtaccaaggcattctgcaagatttcttctaatgccacttctgatatttccagtttcccgatagaattaaatccttgtcctgcctgtatattatgaagatttgctttcagaaaagacattcccttttcaaataattcgggcagtgtgccggtgatatctttactgtcccgatagttgatacctcctatatcgttaccaaaaaaagaaacagctttgatgacaaaagttggacggtactgctgagggtctttgccgaagaacagcaggcctgccaaagtcattctgtcctctttcatgatatgaaggttgtgtaaaagttctgtgtatagaataccgaatgaatctttttcgcgaccatattctttgcggataaagttgtccaaagcatatccgttgatatctttttcggaagtgaaaggaatgggttgctcgtcagcgtacagtatgccggagcattggaataaacgcataatttcactattctccattactttgcgcttatccgccccttgtttagtccagattatcccgttcaaatccttgtaaggtttgttatcaccttctgctatgtgggcgataagaagggaacgttcatctacaataacggtttccgtctgtatatagataaccgggcgaagcaagttagtggctatattggccaagatagaattgagttgctggatttcctgataagacaagccgatgatttctcccgttttgtcttttatgccgaatagtatcattccaccacgagcattggacatagctaccatttcggcggcaatactgtcttggttgggaaagcattccttgaattgtaccgtactggtttctccacattttataatgagctgtaattctttgctgtccatttttctaggtttgtttgtgaatcctgtacaaaagtacggtaaaaaagtgaggaaagttttatgagattatttaatttatgagggaaataattgtagttttgcttccttcatcaaaagtgaagagaagcaaaaccatattttattatttcagtaagaaggttaatccgcatggacctacccctacattgtatttgtttgtaaatttgccgtttgccgaatattcgtttacatagccatcagtggtataacttggccatcctccaaccatattgtaagaactgatataaatgtttccggtaaatggattgactgcgatgccacaagggctatcaacaggttgatctattaaattttttgtttcatttcctgtttttgtatctatactgaaataagtatttgccgttgcgccataaggagcattgataaggtaaagggtattatcttttacagtcattaatgttgcttccgttacatctgtaacaacattcatattgtcaattttttgtactttagctgatatgtcattataattacccattgctaagacatatacgtttccttccgtagtagaacaaattttagtgggatttagtcctacgggtattctttttgcttctgtaaatgtctttaggcctattttagaaacactttttccatttgcataatctgcaccgtaattcattccgtctgagttagcaacatacaggtagccgttggccactgtcatctcttctggatttggaccaacgtttaatgttgcatcgatagttagactaagggtgtcgatacgggaaacgtacccatcatacatagaaacatatacttttccattagcagctataatatcacgtggaccttccccttgagtggatgtcggaacaatctgtttgatggatttagctgtatttttgtctactatttctataatatttgaaccatatatggcaatatacattttcgaaccgtacactattgcatcttgaggggtacttcccaaacttcttttgtttatgtcaaaaaatacattattgcttgctgttcctttttcaaagttaataaaagaaagtgttccattaacattgttgctaagattacctgcattaataacgtacaagcctgttgcctcggttggcgaagttacttcgggagtcgtgtcgggttgtgaagaagggtcttcttccggatctctaggaacttcgatctcattgtcatcatcgttacaagcacagaacagcggagctatactaaataaggctgctgcaaaaaataaatgtttgaatttcatacttatataatttttaaaaatgaatactgcaagttagtttatagcttctacccggcatcgggtagcttttcactatgtcatattgtttatttcccaaattgataatatctccccgaagattgtatgtaaacttctttatcttgaagctgcggtataatgaaagtccgtattctatatatccatccatttcattacttggacgattttcggaagcaatatatcgtttgctcacacctgtagcatgaagagaagcatttatgaaaggattttccaaggctaaagaagcacctgcgctatgacgtggggtatatgcaatctgatgtttgtaatatacgacttccgggtctgttttatctactgcatattgataggtatagtttccagtcaatagtaaggaataatgttttgcaagttggaaagtggtgtttatattggcatctactccccaaatttctactttgcctaaatttaccatattccagataaacatattatagggcattgccacaattttatcttttaccttattataatacccatccaatgtcagactgattgctggtagccagcttgtaaagttgttctggtaagtgatacctatattatattgttgagccttttcgggacgaagatcacggctacccatccggtcaaagtagttttcagaaaaagtagccactctgaatatgtctttataggaagcccgaaggtatagctgtccgtctgtacaaggtttccatgaaaaagagaaggaaggggataattttcgccggttctcagctccgtttccttcttttgcaccattaagatatatcgatccgagtagtatggcaacagctgttatgttatcagtttgatatcggagagttgctgtttgtaatatagaatgccggtaagggcttgtattgttaggagtattggcatttaggttattatatatgtaatctgccgcataaaccatgctccagtgactagtcggagtatatagtaatgctcctgatgtatagtattctcgttggaaataacggtcgtttaattctcctccggggtattttcctccttcatcgtggtaatgagattggctccagttaaatttcccattgattaacaaagaaagattattttcccaataagtacggtaatgtacttgtgaaaagaaatttcgttcgcgtaacttctcacggcttttcgcgttgtaaagaatgactgcaccgggtaattgctgatttgtatcgtaataataaatctttccgttcagtgtgcttctgttattagggctgatgtaaagattcagttctcctctgtaggtttgaatgttgttgttatagcgtttttctttggaaacataatctccgttgactaaagtgaaaggatataggttatctgccctcataaattcaccagtggtagatgctgaaatcttttcgttaaacttttgttcgtagcggataaggggattaatcatcccgaaagaacctgtctttatctgtcccgtcaagtgattttttttgtttgaaaaatccggggatatgctttgtaattttaaggcggcagcagaagcaactgtacgtgccggtacaaaaatatcttcattgtccccaatggtcagtgaaatttgctggatattgtcaatagagaaacgagacaagtctatttgtccgctttgacaatcactgagtgtaaccccgtcataaactacggctgtatgtttggctcctaaactccgaacggagatagttttcattcctcctgcacccccataatcctttatgttgactcctgagaagcgacgtaaagcatcagcaatatccgtaatgccttgttgttgcaattgcttcttgtcgagttgttggaagggactgctacttttaacctgttgcttggtacgttcagccgtaaccgtaacttcgtctattttatgcactttcccggtaatggaatctcctttctcctgtgcctgtatttcaagcggcaataggataaagctgcaaagcagacaaagccatagcttataagcctggttatttcctttcatttaaaaaaacatattaatgaataaataccgcattcttaccgctgctctttcctcgaaagcgacggtcgatgactttacgttttgcaggtcttctgacttactcctgtttacttgccttcccaccttaattatatatacaggcagtggcgtgagtggataaataaacctatccccttataggggtagatggagcttacagcagcgggactgttcaggacttgcacctgattcccttttcatccgcttcctcgcatcagtcggaggtacgcggaacaaaacgtggcaaagatagtttgtttggatgaataagaaaagggaaatgataaaaaatccttttttgaaattagttgcagatttatttctttcccagcaaaagtaggcgtgtgtaacggttcttttttagtggcaaaactagttgattctatccatgttgaagataaaatgaaatagtattgaataaaataaaactgatgcttaacaacattcaaatattgattcgctttattcaatataatcactatatttgttaaatgaataatcttaaaatacgtaatagatgaaacatttgaattttattttagccggtttatttttcctgtgcggtctttgttgtcgggcacaggtgcttcctttggaagaaaatgtggtgttgaacaccaaggaaggacaaatcaaaggaaaactgcttttgcccggtggggtgaaaacctgtccggtggtgcttattatagccggatccggacctacggatatggatggtaattcagccattggcaatttgaggaataattcgttgaagttcctggcagaaggcttggcggcaaacggcatcgcttccttacgctttgacaagcgggggataggaaccagtgcgtcggctggtaaggaggaagcgaaacttcgttttgaagattatgtgaacgatgtaactggctggattgattacctgtcgaaagagaaacgttttacgacgatcacggtggcaggacatagcgaaggggcgctgattggaatgttggcctgtcagaaccggccgaaggtgaaaggctatatctcgattgccggtgcgggtcgtcctgcctacgagattatagaggcgcaagtgaccgctcaacagaatccggaagcggtgcggaaagaggtggcatccattaacgggtctttgaaaaacggcaaggaagtgagtgacgtgccggcttatctgcaatcattgtatcgggcttctgtccagccttatttgatttcctggttcaagtataatccccggacggtgattgcttccgtcaaagtgtcggttctcattgttcagggtaaaaatgatattcaggtatcggtggaggatgccgaatttctgaaaaagggttgcccggctgccgagctgcttttgattgataagatgaaccatgtgctgaaagattgtgagtcaaaggccgtacagcagcagatgcttacttatgggaatccttctctgccggtgaacaatgctttgatagcttctgtcagtacatttgtgaaaaaactgaaatgatatgggagaaataaagaaacgtttgccgttgcaatgccctgcgtgtaatgcaccgttgagggtgggtaggcttttctgtggagaatgccgcacggaagtgtgcggagattttgaactgcctgtgctggcacggctttcagataaagagcagcagtttattcttgcgtttgtcaaatcgagcggaagtttgaagggcatggcgaaaagtatgggggtcagttaccctacggtgagaaatatcttggacgatttaattgatagactttctaaaatggatgagtaatgggaaataaaatgataggcaaagcggtgaatcagtttatacagattgccggtatgtgggcattggtatggggagcgttggggggcctcatttcggtccggtcccaatcctgcctggtggtgttatgcggcagagcatctgattgtgtggctgttgtgccatatgttgataaatcatttttatggataaaataaaaaagaggatgcaaaaagtcttgttggagctttgacatcctcttctatgttatactgatgcgttatttaatcttttctcgaatcttgctaagataggcactcatccccgcagcatctttcttgttgatgatatccaacagctcatttaattctgtacggataccttctacctgtgccggggtgcggggattgaataaaatttcctgcaacaggtagtcgtcttcgcttagtactcctttagctatcttcatgtggcgtttgaaagtagtaccgggagcgtcctgatgcttcatcactgccgcaaaaacaaaagtggaaacaaaagggatagacagtgaataggccactgtctcatcgtgctcgtcgaaggtatactcaaagatattcagaccaaggttttggtataagtctttgaagaagattttacccaaatggtcgccttcgctgatgatgatggcattttcggtgctcagtttgtctaggttggcaaatgtgggaccgaacatggggtgagtagacacataacggaatccgcattggtcataaaattctttcagtccggtctttaccgaggcaatatcgctgatgatgcaatccttggggagagcaggcaatacttggtgaaaagcatccagtgtatatttcacggttgccgcattgataaccagttcgggcttgaattcttcaatctcttcgagtgtggtatatcggtaggtattgtaaacaaaacgaaggcgtttcgggtctacatcaaatacggcggtttcgtgctggaagctcaatacatcggtaaagaaggagcccattttaccggctcctaaaattaatattctcatcggtttacttatttatgatttccatttgttgccttacgctttcttcgtggatggcttcgaatacttttttaatgaaatctgagtccatgccgcacagtgagccttgtgcaccgcgcttgtctagaatttcattgtaacggcctgtctgcagaatggtcatatcatgttctttcttgaatgtaccgatttcacggcagacacgcatacgttttgccaatacctcgataatctcattgtcgcaatcatcgatttggttacgcagttcgcccaggttttcggtggtttgggtttctttgcggatgactagcagatttaggatatagtccagcacatcgggagtgacttgttgggcggcatcgctccatgcacagtcgggattgcagtgtgattctacgattaaaccgtcaaaacctaagtccatcgcctgctggcagaggggagctaccaactcgcgcttgccaccgatatggctgggatcacagaaaatcggtagttcgggaatgcggcgacgcaattcgatagggatatgccattgaggcaggttacggtaaatctttttatcataagaagagaatccgcgatggatagcacccagttgcttcaaacctgcattattgatgcgctcgaaagctccaatccacaattcaaggtcagggttgacagggtttttaatcaatataggaatgtccacacctttcagagcatcagcaatttcctgcacggcaaacgggttggcagtggtgcgtgcgccaatccaaagcacatcaatacctgcctttaaacattcgtaaacgtgtttggctgtagccacttcggtggcaacatacataccggtttcctgtttcacacgtttcagccatgccaggccatctacaccgatgccttcgaaacctcccggtttggtacgcggtttccaaatgccggcacggaaaatcttgatgcctttattggccagcatgagagctgtatccataacttgctgttctgtttcggcactacatgggccggcgataatcatcgggcgttttttttcaattcccggaagttcgatgggttttaaatctaattccataatctgatattttgttttgttacattatctttttaattctttccagtgcttcagccagtttttcttctttggcacagagggaaatacgtatatagcgtttgccgttactgccgaagatgaaacccggagtgatgaacacacgtgcttcgtgcaaaactttttcggtcagttcttccacgtcattgtaagattcgggaatacgtccccaaaggaacatacctacctgattgggatcaaagctacaaccgagtactttcataatctcttctgccagttggcggcggcggctatatacattgacgttcgcttcttcgtgccattccacactattgttgtaagcttgtgcggcggccagttgcatggggcggaaagttcctgaatcaatattactctttattttcaatatccattgtacaaactgcgcattggtggcaagcattcccacacgccagccgggcatattgtggctcttgctcatagagttgaactcgatacagcattctttggctccgggcacattgagaatactcagtggttttttgttcagaataaagctgtatgggttgtcgtttacaatcacaatattatggcggcgtgcaaagtttaccagcttttcataaagttccatcgtggcgttcgctccggtcggcatattgggatagttggtccacataatcttgacgcggctcaagtccatcttctccagttcatcaaaatcgggttgccaatggttgtcttcgcacaggttgtagttcacaatctcactgcccaatattttatttaaagaggtgtaggtaggatatcccggattgggaactaatacttggtcaccaggattgaccaatgccaacgtcacatgcaggataccttccttggaaccgatcagaggctggatttctgtcaccggatcaagatcgacgtgataccatcgtttataccagtcggccatagctttgcgtagttcggggatgccgacagtaggttggtatccgtgaacatcggggcgttttgcttgctcgcacagtacttgcacggtttcttccgaaggaggcatgtcagggcttccgatgcccaaactgattacattcttaccttcggcattcatttgtgccacttctttcagtttacggctgaagtagtattcgctaacattcgccagacggtttgccggctgaatattatatggttgatgttccttctgcatattctcctaatattttaagttcttttgtcaatggtgaaacggcgtcgatagattgcttgtatcttaaataatcattgaagatcacgtctacgtagaacagatattcccattctcggcctataatcggtaatgattgaatcttggtcaggtttattttatagaaagaaaagatagagagcacttgcgacaggcttccttcgttgtgagggagggagaaaacgatgttggctttgtttactttcgaacgttcacgtaagtcatcggctttccatgggtcggccactacaaggaaacgcgtgaagttgtgtttgtttgtttcgatgccttcttccaatactttcattccgtatagatcggcggcatatttggaacagatggcggcatgacctttcaagttttcccgtttgatggtttctgcacttcctgctgtatcttccgtttctactatcttcagtttcggatgttgcatcaggaactctcggcattgtgccaaggcaacggggtgggagtttacttcggtcaatgtattccagtcatcgtcgggcagacacatgaaactgtgcttgatgcgtagtttgtgttctccgataatggtcattccactttcgcgcagcaactcatagttatgcaacaagcttcctgcaatggtgttctcgatagcaagcataccaatgacattgctatcctgtttcatattcgaaaagatttcttcgaatgtggagcagcagattagttcgatttcttcacctgggaagaatttgtgggcggcaatgtcatgatatgagcccggtacaccttgtattgctatctttttcattcgctattgtattataaaaaaatcccgcttctgccggaagcgggatttcgttgttattatcacattgatttattcgttgtttaacgtatacatacaaattcccgcttcactttgttgctaaagtaaaagtaataaaagaagaaaaagtatgtattgtataatgctttcattttgttcttattgttattgaatacgctgcaaaagtaatatatttctagcaaaaacaaataaataagaagttttttttcaaattttttttagacagtgcctgtttggctcctgctttccataattcccggcatctgttgtaaagcccaatctactaatccttctatatgtggtattaagcttttccctctttctgtcagttcatattctactcgtggcggaacttcggcatatactctccggctcactagtccgtcagtttccagtgtgcgcagggttacagtcagcatgcgttgtgagatatcggctattgtcttatgaatatcgcaaaatcgcatggttccgttagcatttaatgtgataagaactagcatagaccacttatcaccaagcctgcacaatacattccgtacaggacaattatcatccggatgaaaatttttcattttttaatatttcctatttccttgtcgttcaacaatggttacctctatgtaagttccttatctacaagtgccttcttgttttttggaagaaagatacttacatttgtatcacaaaagtaataaacttactaaagataactattgttttactagataaatttattgtttcacttataattagttaagattatggcaaagaaagtagctgttttagcagtaaatccggtgaacggattcggtttgttccaatatttggaagcgttttttgaaaatgctatatcctataaggtgtatgcagtggcggaaacaaaggaaattaaaacaaactcgggtattgaattggtggccgatgatgtgattgcaaatcttatagggcatgaggatgattttgatgctttggtttttgcctgtggggatgcggttcctgtattcgctcaaaatgcggataagccttataatgtggacttgatgtcggtcttgaaagcatttgctgggaaaggaaagatcctgataggtcattgtgctgcaggcctgttgtttgattttgctggaattacagagggaaagagattagctgtgcatcctttggcaaaaccggctgtaagtaaagggatagctactgatgaaaaatcggttgttgatggtaatttttatacagcacaaagtgaaaactttgtttggacaatgatgcctcaggtaattgaagccttgaaaaaataagggaattaatgtcgcccaatgtagaaatttcctatatttgggcgacaattcctaaaaatagaaacaatgagatacaattttgataaagtgatagatcgcagcggtacgtctgctgagaaagtagaagggctgaagcatatttggggacgtacggatttgattcctttatgggtggctgatatggattttgccacagctccttttgtaacagatgctatccgtaaacgttgcgaaaatgaagttctagggtatacaggtaaaccagatagctattataatgcgattataaactgggtaaaacagcgttatgatctggttgtggccaaggaaatgataaattttgttcccggcattgtaccaggcatcggtatggctatgaattgttttactcagaaaggggataaggtaatgattcaacctcctgtttatcatccttttgcatgggttactactcgtaatgagcgcactttggttaccaatccgttaaaatgggaaaacggcatgtatcgtatggatttggatacttttcgtgaacagattaaaggttgtaagctgtttattttatgtaatcctcataatccgggtggcgttgtgtggactgaagcagagttacgagcgatagctgatatctgttatgatgagaaagtattggtcttctcggatgaaattcatgcggatttgactttacctcctcatacacatcgtccttttgctactgtcagtgaaaaggctcgaatgaactctgttacttttatgtctcctagcaaggcttttaatatgccgggactatctgcctcacatgctcttatttttaatgaagatttgcgtaaacgtttccgtatctatatggatgccggtgagttggatatgggacatgtctttgcttttctttctgttgaggctgcttatagtcatggtacggaatggcttgaccaatgtttggcatatatacaaggaaatatagattttgtagacgattttttgaaaaatcatgcacctaaaatcaaggccattcgtccggaggcttcttatttagtttggctggattgccgtgaactgaagttgagccagaaagatttgaatgaattctttgtagataaagcacatttggcattgaatgacggggagatgtttggtaaggaaggtattggctttatgcgtttaaatgtggcaagtccgcgttgtatcatcgaaaaggcgatgaaacaactggcggatgcttatcaactatatataaagtgattattttaagtattgcgtcttgaaaatattcacgcataaaatgaagatggataacaataacggtccgaatatgacacccatgaatccgaataaagaaagtccgatgactactccaaaaatggtgatgagtggatgggtgtctgccatcttcttttgcagaataaaacggatgagattatcaatgtttgttacaattaatccacaataaagaagtaatccgatggcatgtgtccaatctcctgaaagagcaagataggcagctagcgggaaccataccaatgctgttcctacaataggaatgacggtggcaaagcaggtcaggaagccaaacaatagcgcgctgggtacatcaaataaatagtaacctaatgtagctattcctccttgaatgactgctagtaagggaatacctatcgcattactccttacaatcatattaatttctttcagtacattttttttgtttgtatcgctgaaaggaagtaactcatagatatatttttccatttgaattccgccaattagcatgaaatagagaacaaagaccaatacgaaagcattaacggcaaagctactgatacttcccatcagaaactgtccgatggcaggaagaattgaggctatggatgaaatgttttccgcatttagtaagtcatatcccgtcttggtatggagccaatcggcaagattggttaccgtatggataaaacctgtcgtatctacgtttaccgtttgtaatttattgatcaataaccatacggctaatgataaaggtacaagaaagcacataatagcttctatcaagagtaaaatggctgtaatgctttttttgaaatgcttttcttgggtaagataaaacatttgttttcttaccataatgtaaatggtgcatgctcctaaaatacctcccatgaaaggagacatttttataaataaaataagtcctaatcccagtataatggtgataagggagtatttccaatattgttcttttacgctcatgtgttttttgcttattttgtatataaataaacaataaaacgaattgaaatgttccgcttttaaaacggaacattcttagtcatgttttcataattattgtattgaccgctaatattaatttcattttcaggagccagttctattgctttcttcatatcttccacagatccgtctttgtctcctttaagtaatttgatacgtcctcgttcatgatatgctttggaaaagtttggattgatttcaatggcttcatcatatatagccaatgctttgtcaaaatctttgtttgccagatatagttcgcctgacaggatataggccttttcattgaacggattgagtgacaatacttgattaaaacattcttgtgcttgttccggttcattggtggcggctagaatttctcctttcaagagcaaggcttgttcgtcgtcgggattgaggctgagtaacttttgtatatcttcagcagcatcttttgcttgtttcattttccaaagtacttcagcgcgtagctggtatgcttcggtataatcttctttcaatacgatagctttagtcagcatggcaatggcagtgatatcatctttcatgccgatagctgcttttgctgtcaaatagaaagatagggggttcttattatctaaaaccaaagctttttggcaggcatccttcatattttcgtaatcttcctgcatatagcagatgccagctagtgaaaggaaggtgtttacttgttcaggatcttttgtagccatgcggtctagtgtgatacgggcgtcatctagtcggttcgcctgtgtataagcagtggctagcaggctgagagtttctaattcatcgttgatggcaactgcctcttcaaaacatttaatggcataaggtagtttacccatacgttgggcgcggatgccatcgtattttaaaatctcgaagttctttttatcatttttctctttttcggtttcggggatgttgtttccgccgaataaggatttaaataagcccataatttatagttgttttatttgtctattgttataataaatcgtctgaggtaaatttcttgttcctgatgctggatgttggtaaaacgtactgcctttattggtttctgttgtaaactggcaatcagtaggttcttttcttgtgtaaagtttactttactccaatcttttccatttgcagatatctcaaggcttccccaagttgcgatttccggtttcccgaaatctatctctatattttctccgggataaacttgatccagttcgatagtcaatgaaccattaccgggccatttgataacttccagcgccggagaaatctgaatgcggtttatctttacctgtaaaggtaagttctttatctgactgatatcgcttattagtttatgcggcatatagtcggtttcagcattcagcagtgtactatatttttggttatagcattgcgtgacggtggcgaaagtttgatcaatcaatggcttgattacccttcctgctgtctttatacccggctggtaagggttttggttgtatgtctggtcaatttgaaacatttgttgttgcaaggctttcacgtgcttgtatttacgcataaataaagattggtcatttttgtcgtatgctttgaccattgccaatacttcatttccggtttctcccaatagtttgaattgataaagccaaggcatgatttctactataatcggatttttatcagcatgggcgactaaaatatcacttgattcaatcatctggctgaaggtttcttgtagaatagagaaatctttttcagtgtaagttttattttttatgtaactttcagtaaagctttgcgctgtaggttggagatttacagattcctctcggcgatatttatgtccattgggacccaagtccgaattgtgggcagcaaagaattccaattcagtggctgcatcgggcaaaatgttcataatagcatctttccaagttttttcactgttatatttttggggattccaagcgtatgaggctacactataaatagctattttagaagcctcggcatgttccatcggattagttacaaagccagacatctgatgggctatttgagtatcgtttccatatactggtcccatgagcagatgatctctaacgtaatcggaaacaggaaagttccaccatatatatgccggacgtttaatccggtcgtttatccattgaataccatcttgggtaatatcggaaataactcggtctcctgtccacataatttgtatggatggattcagtttgtctcctaaagtcgtaagatatcctttagcagggtcggaccaacttttattgtattccgtgggacacatgataaggggagttacatctggttttacttttacaaaatgttcatctatgtagttcagcagttctgcttgtttcacagggttagtaccttctcctgaaatatcatcaaagaagacggcaaaagaacggacaccgagatgatacatcttttcaaattttgccaataatagttcacggtcttccttattccatttgatgtcttgccctggatggatggcccaaacaaaatctatttcgttttcttgggctacttttactaattcctgtaattgttttgcttctttttcggggtaaggcaagcgccagttgggagaactatggtaaggatcatctttaggaccgtatatataggtgttcattttgttttcaccataaaattgaagttggcgaagacgggcattatggctccagggagtcccgtaaaatccttctacgacaccacggtagcatatggccggatagtcttgtatctctattatcggtaattggttatctttgagcaattgttttaaggtttgcaaggcatagtaggttccacgttcatcgttccctgccagaattatttccttattattgatggatagataataaccttccttttggttggggatttgacgagtaaacttgcggatagacttgtctcctttttctccaatataaatgcgcaaaccggtattggccgggtgttttccacctaataaatcttttaattcttgtacggcatatggattagcttcagtttctcccaagagctggtaagtttcaggtaaattgatttgtccgccttgtttggaaacttgttgagggatgggctgtacatctatgttttgggcaaagatagtacaaccggtaaaaagacaaatgattgccagatgcatttttttcatattctgttggggtaaaaggttaataaatcaatggcaaagatacgatttatacagaaagaattccattttttaattgtattatttcttcggaaagtaggtaggagagtaccttttccgctttttcacgattgctattcaattggttcagtagttctgaaacaggcatggcgtttgcctgtaatagctgtttgatttgtttttccaattcttgaaattccccctgttttattcctgaatgatgtttgttaaggcatacatcacattgtccgcagttgtgttcgttcttttctccaaaatatctgagtagcattcggctacgacatttatcatcggctgtggcatattctatcatagccttgattcgggtggtatagcttttttttcggtcttcgtatatttcccgagttaggacaaggcgattcttttcttgccgttcacgggtatatataatataaggtgtctttttccgtggaatgtaatgtatgatatgtctacgagttagcgtcagtagaatttcatagattcgttggcgggttaatccggaacggattactaaggaatcttcgttaatataggcataatcagtaaataatcctgtataagaacgcaagatgatgtttatcagtttctctgtatctgtatcattctcgtgtagtttatagagttcgtcgcgtttcatagtgaaaagaatacgtgaagcattatcttgctcgtccgtatattctaaatatccggcacgggtcagaatctttaaagcgctgtctgcttgtacggggaaatgtttgaagttacgacagaattcatccaagttaaaagcaaaggtgcaacctataccgtctcccatggccatttgaaaatagtagttgatatcttcgtacacttttcggatataatccttgtcgggaaatgtatcactgatacgtttgttgagagtggttttatcactttgggcgtatagcagaacagcatatgctttctgcccgtcacgccctgctcgtccggcttcttgaaaataggcttcaggagaatcaggcatatctatgtggataacgatacgtacatctggcttgtcgatacccatgccgaaagcgttggttgctaccatagtacggctttctccggtgagccagcttttttgacgttgatcttttacatcattattcaaaccggcatgatagaaagtggcagttatgccgttattgaccagtagttcggcaatttcacgtgtgcgtttccggttgcgggtatagacaatggcgcagccgggcacactatttaaaatatgtaatagctcttcctgtttattttctgtaggacgtacaatataagccaagttttttctttcgaaactcattcggaaaacctgactgttttttttaaagtttagttttgtttgaatatctgttactacttccggagtggcagttgctgtcagtgccaatataggtatgtcaggaaggagttctcgaatttctgcaattttcagataagcagggcggaaatcatatccccattgagagatacagtgtgactcatctactgtgatcatacttaccttcatgttccgtagtttgttacggaatatttcagtatccagtctttccggagaaatataaaggaatttatagtcgccgaagatacagttttccaatgcaacgatgatctcttcgcgcgtcatgcctgaataaattgctaaagctttgataccccggtcgcgtaaattgcgtacctggtccttcatcagggcaataagaggtgtgataactaaacataatccgggttgtgctaaagctggtacttggaaggtaatggatttgccgccaccggtaggcatcaatcctagcgtgtcgtgaccgttgcctatactttcaatgatttctttctgtatgccccgaaagttatcatatccccaatattgttttagaatttctttataggtcattggaaggagaataagaaaattatgtcaaaaccccaatgacttgtcatcttattattctgataagtatctgataacgtcattaaagttttgacatatttcaaagataaatttttaccattattcctcactgggttttatatcttctatttgcaattgtacttcaccacgcttgtgcgtattctcttcaatggtataacaaatatcaaaagaacgtttggtcttaatatagcgtgcttgtgaactttgtccgaaagcgatgccattcatcacattgtttgatttattgtctaccaattccaacttgatatgctcctgatcacgacctactactttgctggtaccataatcatatacattatgtgtacaaaagataggtttgtggttgtctggtccgaagggattgaactttttcaggtcggcatggaacttcggagtgatatcccggaagtcaatttctgcatcaatatctattacagcactagtctgttccggcaaaatatgttctgtgacataggtctcaaaacggcgggtgaattcttccacattttccactttcatggatagtcctgcagcgtaagtgtgtcctccaaaattttccaacaagtcacgacaatattcgatagctttgtaaacatcgaaacctgatacggaacgggcagaaccagttgctagattatctgtacgggttaatacaactgccgggcgataataaatctctgtaaggcgtgaagctacgataccgataacacctttgtgccacgcttcattatagatgacaatggaacgccggtctgctagtccttccaagtggtctacaatttggttggcctcttcggtcatggtcttatccagatctttacgggtttcattgtattggttgatttggttggctttctctaatgctgccgagaagtccttttctatgagcaattccaccgcttcttttccgttctgtatacgtccggatgcgttgatgcgcggacctatcttgaatacgatatcacctacggtaatttctttttctgataatccgcatacatcaataatagctttcagacctacactgggattggagttcaactgctttaaaccatgatgtgtcagcactcggttctctcccatgataggtacgatgtctgatgctacactgacagcaaccaaatctaataaaggagttagttgatgaaattcaatgccattattcaaagcgaaagcctgcatgaatttgaagcctacaccacaccctgaaagatgatcgtaaggatacgtattgtctgcccgtttggcattcagaatagctacggctggtggcaatatatcatcaggtacatggtggtcgcagatgatgaaatcgatacctttttcttttgcataagcaatttcctctacggctttaataccgcaatctaacacaataataagttttacacctgtttcacaggcataatccactccttttactgatactccgtagccctcattatatcggtcgggaatatagtagtcaatgttcgaatagaactgctggagaaatttgtataccaatgctacagctgttgtaccgtctacatcataatctccataaaccatgatacgttctttcctgcccatagcttgattgagccgttctacggcaatgctcatatccttcatcaggaatgggtcgtgtagctcgttaagctggggacggaaaaatcttttagcctctgctgctgaggttatacctctttccagcaacagcttacaaagaatcgggctgatccctgtttcctttgctaatgctttagctgcttctgtctgttcttggcttggaggttgataattccatttgtgattcattttatatattgttttttcttttttctgctctcggagacgggatgataccattttctagttatacttacccaatcaatccgtaaagttaggaaaaaacaaataaaaaaaccgctaattccatatatattttatggaattagcggtaaagtattgtatagtagcggattatttgatgcctaattttttagcaatttctttaggcagtgcatttttattgactacgatattcatggttttgtaacgaacgaatgcttttgaggcgtaccataagccttcgtattttccagcttttccccaagaattctttaccatataatagtcatttccttcttggtctttagctataccgtaaatcaacatgccatgatcgtcggttgtttcccaattgtcatatgcttcctggcgttcttcttgtgtacaccatttctgaggttgtggtttggtgttcagtttcttttcttccggtttcattttcaaccaatgagccatgtctgacccacttagttcttgcactttttccgtgtcgggcataacagctacgccatcacgtgtaaaaccttgttcactgacatcagatccccatgcgattggatagccgttattaatggcattgtcaaaaacctgcatgaattcatcaatgggaaggttgtatgattgtccccaacgccagttgtcttgaatttcaaggacaaatggttcgtagaacggatggtgggtatacgaggttaatgaaatgtaatcatttggatttaatcctgttgattcgaagaatgaatggggagtgtattcttttcctttataagtgaatttttcagggcatttacctaaatagatatcatgaatagcggcaatggcctttttccataatggattatggttattatctgtttggagtttgcgtaattttcctttggctattgctgctactacagcatccgatacggctgtaagttctgtatggttacttagtgtatcaccatacatgactcccggacgcataacttcttcgggcaccagaccaaattttttcattccatagataacgtcatagaatgatcctccttgggaaaaagatacatctccatgagtacgtacggcggcatcagctcgatccaaataagtttggtgtacgatgtacatttcagaaaagtcgtattctccttttcccatacgaagtaattctgattctagaaaggccatactggaatagcaccagcaagtaccggcacggctttggttcttgacagaagtaataggcagttcttttactgtagtgaatacaaacccttcttcctttggctcttctttttgtgcatcttgtgcaaagaggcttatactgcataaacctaatgctgctaataatgtaaatcttttcattttagaaataaaagttttgtttgttatgttactcattcataatagtttctacttcttcgatagtgatagggatgcgtttctcgccagtgaaacgggagccttccgaagtaatcaaaatatcatcttccaagcggatgcctccaaaatctttgaatttttcaatagcatcaaagttcaggaagtctgtatgcattttctctgctttccatttgtcaatcaatgctggaataaaataacaacccggttcatcagtaattacaaagcctttctgtaagcgacgtcccatgcgtagagaggctagcccgaactgggaagaaggacggatttcatcgtcatatcctacgtaaatttgtcctaggtcttccatgtcatgtacatccaatcccatcatatgacctaatccatgaggcaggaataaagcatgtgcaccagcggcaacagcttcttccacgtcgcccttcatgagtcccaggtcttttaatccttgaactagcactttgcagacttctaagtgtacagacatataggttatacctggacgagtaatttccaatgctttatcatggcaagccaatacaatattatacacatctttttgccgtccttcaaatttgcctcccacaggtacggtacgtgtatggtctgaacaataatttgtgactctttcagctccggcatctgttagcatcatgcgccctggctctaagatatggctatggtcatggttatgtaatgtctccccatgttgagtcaggatagtggcaaatgaagtcatgcttccataagaagcggcgatgccatccagtactccggcgatatattgttcctttattcctggtttacatagacgcatggcggttgtgtgcatttcataaccaatattacatgccaagtcgatttctgctatttcgcaagcttcttttacagaacgtaaatcaactacagcttttatcaattctacagaagcatatttctttactatagccgcacggataccggttaagtcttctaagagcatcatattatcgaatcggtagggaggaaggaaatgtacttttctcccttgtgtgatagctttttttaccacttcttttagctgggggaaaggaaaacttttctgaatacctacttgtgcagccaattctttcacactgggttggggccccatccagataatgtcgtccatatctacatcatttccgaagaaataatcttctcctgcttctatatctattacacctgcatatccggggtgagaatgaccgaagaagtagaggaatgaactgtcctgacggaatttatatgtgttatccggatagtttgccggagcttcattattacctagtataaggataataccattttgcactttatttctaagtgcctgacggcgtctttgataagttgcggaatcaaacatggttaactttattttaattgaatatttattgaactgtgttgcaaatgtaataattataatcttaaaagtactatttgcttatttgattttttaatcgatttcggctttatttttatcatttgtcaatcttgcttttctaatttcacaggtttctcttatatttccttgataagttgccattcagtaatttatcaatgaaggagaatttgattgatttttatgatggaatgcaattatttaataaatataaaagatacggctaaatactttgaaaaggttaactttgcagtgaactctttcaaggatagatttgttcctcaacattgattatgaaaatagatgataaaacaggactggtactggaaggcggaggtatgcgcggagtttttacctgcggggtattagactatatgatggataagaaggtttggtttccgtatggggtaggagtttctgccggagcgtgcaatggtctttcatatatgtctcgccagcgtggtagagctaagtttagtaatattgatttattggagaaatatcattatatcggcataaagcatttatggcgtaagcacagtattcttgatcaggaattgctttatgaacattttcctaaggaaattcttccttatgattataaaacatatgctgaaaattctgctcgttttgaaatggtgactactaattgcattacgggtagggcgtgttatttggaagagaaacatgatcctcgacgtattattgccatagctaaggcgtccagcagtcttccttatgtttgtcctatagcttatgtagatggtgagccgatgcttgatgggggaattgtggattctattcctgtgttgcgtgctattgaacaaggatatgataaaaatgtagtggtacttacccgtaatcggggatatcgcaaaaaaggaaaggatatgaaaattcctcattttatctataaaaaataccctcgtttgcgcgtggttttaagtaaacgttgccgtatttacaacgaacagcttgatttagtagagcaattggaagacaagggcaggattgtggtaattcgtcctgaaaagccgatggaagtggatcgtattgaaacagatataaagaaactgaccgatttatatgaggaagggtatgtctgtgcaaaaaaaatgtttgaagaaaaacaaatacttcaaaaataaatttttggccaagaatgtttttataaatggggatattggaggaatgggggatcattcttgttatatggggtggaacttcatctgccccatataacaagaatgaatgctctttccttttggaaagaaagataatatattagtaatataaatgtgacggtacagttaatacttgctcggtataaacttgctcgacagtcggataatctatagtgaatgtcttttttaaatcttcaaaaaaagccatgaggactatgggggaagtcctggaagaaggtatatattcggaaattataaatgttcttttgggctgttctggaagagttaaatcaaatgagatgagatgttttgtcccccattgttcattttctatttcattggactttctttcaaaactaccttctatagctttgtctccaaacttttcttgataaaccagtactttgcctcttgctatttctgcatccgtatagataaatttgtatcctcctcctgtttttactggtattgtagctaatgctttttctttaattgtttgtttttcagagtcttttaaatctcctgtaagaaatatatcctgtttgcttacaatgtaattatcggtgtaatagtctactattacatgaatgtcaagtgtgtttcctgattgatcttttacagtaataattgcttcacctaatgctaatgcttttatggatatgtcacaagaagaaatcattttagtttctataatttccggtttatcgcagcttatttcataattcccgtctcctccttgcaagggaaaagagtatgtctgattattaggatagtttaattttatatttgctgtttctctattttttaaggagatgggagcaagttcatcattgctgcacgatgaaattactaaagagcaaaggaaaataagcactgtggctagcatactgttaagtctcatagtttgatcttattttatgttctacatagtttaaatgagagattagatgatttactgcttggcaattagaaatttattttttcttgaatttgtccagtctgtggataaaatatgagaatgtaaaatgaaaaagaggttgtgtcaaaatgctgacacaacctttttttcatgatttacagtcttcgtatatttccttttgcctatgcggcttttttctcattcattcggtaacaagttgctatattcctgttgtatcgggttataaatagcccaataaacatagatttagcaagtgtaatgaagtcctttcctacctttctcagttttgcgcacatctgtttgatattaaacgctatagcaaagaaagcaaagtccattgtcactttgtcttttcccacatgccggaacctcctgtatgccatgttgtatttcatttgtccgaaaacagcttccggttctatacaccgcctgcctctatgcctgattccttcttctgagagcaacctttcccgtgcctgccgtttatattggtttaaccggtggttgacttctatcatacggttcccccgtgctttaaaacaacttccatgcaaaggacatccttcgcatctttgtgctttataccgggcactttcggtgatgtacccgctcgctgttttgtcacgtctggttcctgtacgtttcatgtgttgccccatcggacaaacgtaataatcctcccccgcattgtaatggagactttccgcatggaacgggttgggagtataacggggacgctgttctttatggaagtagttgtacttgacaaaggcctctatcccgttttcctgcatgaaccggtaattttcttccgatccgtaaccggagtctgccacaccgatacccggtaagcggttatagcggtactggaaggagtggaagaaaggaatcagggtcagcgtatcggtagggttgggaaacagtcggaagtctatgatgaattggttttcagtacctgtttgtaaattatacccgggcttggtctgtccgttcttcatggcgtcttctttcatacgcatgaatgtggcatcagggtcggtcttggaataggaattacgttctccaaggacttcaaggtgattgtcgtattccatcagcttgtcacgatacccttcaagttccctgacttgtttcttcttttctcgcagggctttcttttgttccttgtcctgtgttgcaggttgatgttccagcacttctttaagttcattcactatgccggagagcatggagggagtcaactccacggatgtgtcttttacagagctctcctgtactatggcttcatccacctgctccagaaggatacgaatcttattcagcaaccttgtacggttcctctcaacggtcttacgccagacaaaagtatatttgttggccttggactcaatcttcgtaccgtcgatatattctacatcaagactaatgaaacccttgtcggcaaggacaagaaccaactgcgtgaagacgttgttaatttcctcctttacacggttacggaaacggttgatggtaataaaatccggatgctcattactggcaagccagatataatgaatgtcacgtaaaagaagcttctctattttacgacaagaatagatattgttcatgtaggcgtagataatcaccttgagcatcattttaggatgataagcacaacggcccgtttctttataaagcttcttgaaattatcaagattgagattatcaacaactgcattgactatgcggacagggtcatccgcagctatgttttcatcaattctttgtggaaaaagaatggtttggttgggaatgtaaggacgaaaatgtaactttgccataacgaaaaactttatgcctaaagttacataaactttgggtaataacaaagcccgggcttgggaaagtctgggctttgcacataaaaaaggttgtgccagcattttgacacaacctcttatagttgagtttctagtttctgatttttatttggcaaaacttacggcacgtgtttcgcggatgactgtaatcttcacttgtcccggataagtcatttcgtcttgaatcttcttcgcaatttcaccggataaactttcagtttgtttgtcgtcaatcttgtcggcacctacaatcacacgtaattcgcggccagcttggatggcataagtttttgttacccctggataagacatagctaattgttctagatcattcaaacgcttgatataagcttctacaatttcacgacgagcgcctggacgtgcgcctgaaatggcatcgcatacctgtacgataggagccagcaggctagtcatttctgtttcgtcatggtgagcaccgatagcgttacagatatctggtttctctttatatttttcggctatcttcatgcctaacaatgcgtgcggcaattctggttcttcatcaggtactttacctatatcatgcagtaatccagcacgttttgcttttttaggattcaaacctaattcagaagccatcacagcgcaaagattggctgtttcacgagcgtgttgtagaaggttctgaccgtatgaggaacgatatttcatcttaccgataatgcggattaattcagggtgtaggccatgaatacctaaatcaatagtggtacgtttaccagtctcaataatttcttcttctacctgtttgcgtactttagctaccacttcttcaatgcgtgccgggtggatacgtccatcagtaaccagttggtgtaatgctaagcgggcaatttcgcggcgtacagggtcaaacgctgaaagtacaatagcctcgggagtgtcatctacaacaatttcgacgccggttgctgcttctaaagctcggatgttacgcccttcacgaccgatgatgcgtccttttatttcgtccgattcaatatggaatacggttacagagttttcgatagcagtttctgtggctactcgttggatagactggataacgatacgtttagcttctttattagctgtcaacttggcgtcgtccataatgtcgttaatataggaagcagcctgtgttttcgcttcttctttcaaagattcaatcaggcgttctttggcctcctcggcagaaagaccggaaagagcttccagtttttcacgttcttgcatttgtaatttatccagttcatcctttttcttgtctatgatgacaatttgagcttctagattttctttgatagcttccgcttctgtacgtttgcgttggacctcttcctgtttttggttcaacatcagttcgcgttgttttagtttattttcggcctgctgaatcttttggttgcgtaaggcgacttctttttccagatcagcttttttgttcaggaatttttcttttacttccaaaagcttgttttttttaattacttcagcttccgtctgtgcttctttgatgatgatgtcatacttagatttcaggccatatctgaaaagcatgtatgataggccaccacctacagcgaaacacacaattgctattattaccgttgttatcattgttattaatttatatataaataaaaaacgcacaatctatctgttaagaacccttctcttgacagtatagctgtgcgtgaatatccttattaattctaaactattactctctgttactgatctgtttttcaagttctttggttagctcctgtaatttttcctgataaggcgcagtatcattcctgtctttcatagaaatattttcgaaagccaactccagtgcagccattgcccaatgccttgcggggctgaaatcggggtaataactacggtatttgtttagtttattgtcaatctgtttggcagcgtccctgtataactgttcatcttcacgacgaatggtcatcgggtatcgttcgttgtcaatcagtagatgtatcttcatcatatcgtccataatactatcgttttattgttcaacttcttctattcgtttaataaagcgatgcatttgtcgacttcacgcacaagccttgacaaccgttgttttgtatcattgatatctttatcatgaatactgattgtcctggccattttcaaattggtatacattacttctaattctttccggctattctccaatcgtctcacctcctcgtttttttcagtgagaagttgctttaactttgcattttcatgtttcaattcatcatgcaaatacataaaatgcctcagttttgcctcgaaagtatttaatagctttttgtcttcttcagtcattttataccaaaattgtacacaaatataaaggattgggagcaaacacgaaaatatttcgtcctaaatttatcgtttatcgtttaaaaaacttttttaacgtctttattagctgtttttcccgtgctattcgaatatgatctttttactattacatatatctgttgaggattgtttactgttttaatgttttataggatactatgtgccaggtggtactgattgcaataatcaggaacaggattcttgcccaaatgtagggtagtatccagatggcgcaatagcttagggtaatccatattaatgatacggaaacgatcttggcatgtaaaggtattgctttatgctcgcggaaattgcggatgtagcttcctaaatatttttgttggatgagccaataatacaagcgtggtgaactgcggaaatacatggcagctgtcagtaataaaaagggggtggtaggcagtaaaggaagaaatatgccgataatgcctaatatgagtgaggtcgttcctacaatggtatatagtattttcatagatgcaaatatagaccaaaaaacaaaaaaatgctgtgtcctttttatattattcttttttatggtgtatctttgcgtcctgtagcaccgaggtgacattaggtgtgagttctttcttattataattaaatgctatgtatacagtaattaaacgaatggaaatttcagcttcccatagcttgaagctgtcgtatagaagtaaatgtgagaatttgcacggtcacaattggattattaccgtttattgtcgttccgaggttttgaacgaggatggtatggtggtggattttacgcatatcaaggaaacggtgatggggcgtttggatcatcagaatttgaatgaggttgtttctcttaatcctacagctgaaaatattgcacgctgggtatgtgagcaaattcccacttgtttcaaggttgaagtccgcgagtcagaaggaaataccgttatctatgagaaggattaatgaaatattttatagtttacagggggagggatatcatactgggatacctgccgtttttgtacgtttttccgggtgcaatttgagatgtcctttttgtgatactcagcatgaagaggggacattgatgagtgatgaggatattgcaatggaagtggcaaaatattcgactcaagtagtaatactgactggtggtgagccaggattgtggattgatgaaaaattagttgatgcattgcatcatgaaaggaagtatgtttgtattgagacaaacggcacttgtcggttgcctgaaaatatagattgggttacttgttcccctaaagaaggggcgaaaataaatctagatcgtatagatgaggtgaaagtggtttatgtggggcaggatgtttctgcttatttggatttgtctgctagtcattattttttgcaaccttgttcttgtgctaatacggaagaagtgattgcttacattttgcaacatcctgagtggcggttgagcttacaaactcataaacttttgcaaattccttaagaaaatagaagatataaaaaagattattcgatggtttggcattgaataatcttttttgcacgggaggagaggctcgaactcccgacacccggttttggagaccggtgctctaccaactgagctactcccgtgtttgcggctgcaaagatagtgtaatatttggaatatacaaacctatttatgaaaaaatattgcccattattcgtttaatagacctaattcattgaacatgatccggtaaattgctgattttttttcaatgggcaacgggtaggcacggctggacgaaggcattctgtataatcgcattatccggtcttcgaattcaaaaggttcgctggttcctacaacgggttctttcacctttatttgttcacgaataatatccgttgctttttgtcctgtggttacaatagccttgcacattggaatctgcttcagtagcaaactgatatctgtctgttctacaacttccagaaatttgtctgaggcattgtcctgtaaacggcgaacagctgaagcggtatcataaagtgcgataccttttttatttaagagatcaataatacgttccttgtcaaacacttttttatcaggattcagaaagtgctctttgttttggaaaaatattattccaaaaatacgccacatatcattttgcagattgggataaaagaattccatgctccatcgtttcttttgtgggggaaaactacctaacatcagcagtttggcgttagccggtaaaaaaggctctaatggatgttcttctatatttaataaggatttcataaaatctttaatgattattcttttggctttggttcttttttagccagtaatacgatgttatacacatattccgtcatccagttttcagaatatcctaaggcttgtttgtatttacgaatggcaacacaggtcttgtgcacgctttcgtctttccagtcggtcttggtcatgatatcatgaattgttttctcggtcatgttacgtaacatttttttcattacgctgggcatacggaatttccattgcatcaaattacctatcagcatcatcaagtcattgctgaatccttggaacataaaaagataagtcttgacatcatttacattcttgcaattcttttttatagaaccgtcaatttctttaaagaaatcatcacttaaaccataaagttctactaacatctttttgcagcgtgatttctcagcaattcccaacttgttgttttgggtcggtattttgagtgtacgtttgaaaactgccatatctggcaaaaaattaatatttgtgatacctatattgcaggccattacagactgataatatacacggatcagtgtcatgaagtcttccataccacctacgtggcttgtttcttctccttctgtctgttttttaccaaataattttgaaaatatgctcattgtgttcttaaattatattgttttcctgtctgcaaagatagcgataaaaactgaaacatttttgattaaaatccttttgttttactatttatcatttttattgaatggttgatgccggggttttgttttattgctttgtgttaccagcattctaaatcattttcaatgtctttcattctgtctttggtgaaaactggatttttgaccccgttgcgtttttgaattcggtagtcttccagtagacggaatgcatatttccctagtaaagtaatggctatcaagttacagatagtcataaatcccattgccatatcggccaggctccatgccaggtccagactggctaatgccccaaacataaccatcccccccactgatatacgataaatggggatagcccatttctgatgagttatgtagcgtacattggcttcaccgtaataataatttcccaaaatgctgctataggcgaaaaacagaattgccaccgctacataaatagtcccaatgttgcctatttcattatttagtgccatttgagtaagttttattccattgacttctttagtggaggcccctccgctgaaaagaatgatgaaagcagtgcaggtacatatgacaagtgtatcggtaaagactcccaatgtctgaattaatccttgttttacaggatgggtaacatcggcacttgccgctacattgggtgcggaacccataccggcctcattgctgaataatccacgtttgattccttgcattaatgctatgcctatacctccgctcaatgcctgttcccagccaaaggcattcgctataatcaattcaataacttctggcaaatgctttgcattcacaattacgatgaaaagggataaaaagatgtatcccaatgccatgacaggaacaataatgctacttactttggcaatacgctgaatacctccgaagatgataactaatgtgagcgaggtaagtatcactcccattaagctgggaggaatattgaatgcttcctcgaaagcagcgcaaatggtattgctttgtactgaattaaaagcaaatccaaaagtaaagataagcagaaaggcaaacaaaactcccatccatggctgttttaatccttttttcatgtaataagctggcccgccaacgaaagaattatgtccgtgtactttatataattgggccaatgtggactcaataaaagcgctgctggcacccaaaagagcaattacccacatccagaaaacagcacccggaccacccaaagtaatagcggtggcaactcctgctaaattacctgttcccacgcgactagctatggaaacggcaaaagcttgaaaagaggaaatatggtgttcgcgaccttctgtcttgccggtagaatcacctaatagacgtaccatttctcttatcatgcggaattgtacgaaatttgttttaaaagtaaaccaaaacgcacatcctaacagcatgatgatcaaaatgtaagtccaaagcacatcattcactctgctgattaatagggtcagtatatccattttacttattccttgtttaatttaaaatagaacttatgtccatggaaaacaagttccactagaccaaaacggataaagtctgctaatagttcacaagttgtcttgtggtttaatctgcaaagtttgcaacattgatttaatgaaagtttttctttttctttcaagacatccagtaaccgttgctctctttcggtaaatgttacaagtgctccttcaggtttcttgctgtgttgccacatctttagatggacgggagtggccagtatgttttcgtctttgatgcggatataggcccatggcttatccatttcatctagggcatatacaggtttagaaaccgtttcgttaatacgtatttccaatacagtctttccttctaccttgtaagtctgcgtttccagttcgactttgggcttgcaatacatggttgctgctgcttctatcatatatatttcttcgtcagagcggactcctgctattttgccattgtcctttactcctattaatagcctgccgccctcggtattggcgaatgcggaaaggctgcgggctattttgcgtgcgtccgaaatctcgaatttaaaatcctgatgacagtgttctccctccgagacaagctgtcgtatgtattgtgtatccgttaatgctttcatttcaattgcaaaaataggaaaaatgaaacatattgtgggtatcgaatgataaaaaagccgatattagtttgtctgttatcaagctttttgcttcatttgcagtggaataaaaataattagcctttaaaatctatgggaataagaaaaaaatgtttgatcattacattattatgcttttctagtctaatgtatgcaagtgaattcatgtttaaacatttggaggtgaaagatggtctgtcaaacaatcaagttcttgatatctttaaagattccgaaggttttatgtggtttgccacagcttctgggttgaatcggtatgacgggtgtcagatgactttgtttcgtagttataatgccgatccggcttctttacctgataattatatcaaaagcatacaagaagattataaaggaaacttatggattcttaccggtgtgggttatgccatttacaactcggaatcagaaacatttaatagggaggtgcatgcatggctatatgaagtcggtattgacggaactcctgcattagtatatatagaccataataaaaatatgtggttttatataaaaggaaaaggctgttatttgtacattccggaatctcaattactatatccgcttttgtttgatactcatcagttgccagaaggtgatattacggacattgtagaatgtagagagggaatcttgttggtatataataccgggaggcttgtttgtctggatactcggacaaataagattaaatggcagcaggatgatttagctagggagttgggaactgacaagcagggaattttcactctgtttgtagatcgtgataatgatatatggatgtatagtccatttggaatatgggtttatagtccggagcagaagaagtggctgtcttggctggcaaatattatcaagcgtcggtctcataacatggtccgtgctgtatcacaggataagcaggggcgtatatggataggaacagatcaggatggcattgatatattagataagaagacaggggaagtgaggcagttgcggaacaaggcaggtgatgaacgtagcttgcaaaataatacagtaatggttctatacgaggattccagtgaaactatgtgggtggggacttataaaaaaggaatttcctattttaatgagtgtgcttttaaatttggtgcagagtatatgggagatattagttgcattgaagaagacaaagagggctatgtgtggctgggtatcaacgatgtcggtatcatatattggaattccgtgactggcaaccgggctgcttttccacagaaaggtacggataaactcattactgatgccattgtttgcattttgaaagctagtgatgggaaactttggattggtactttggggggaggcctgatttgttatgataacggtcgtattattcattataaaaaaaacataccggaacggcaaaattctttggctcataataatgtattggctttggctgaagataagcaggggattatatggataggtacattgggtgggggagtgcagagtttgaatcccaagacgggtttgttcaccacttataatacaacttcggccggcttgatatccgattatgtttcctctttgtgtatgggaaaagagggctctttgtggattggcaccgttcagggactttcggaattggatattgaaactaaaaaagtggttaatctggaaggtactaaatctggtaaggaatatttttctgatcagaatataagtcaggtgtatgaggatagccgtggattgatatggattggtacatgtgaggggctgaatgtttataatcccaaaacggatgaactgattatattaggagtggagcaaggagtttccagccctatcatttctggaatagtagaagatggtaatgaaaatatatgggtgactacagcacgtggaataactaatgttataccggcagtagatttaaaaacagggcgctatatttttcatagttgtgtttatgatgataaagatggtttgcaaaatagtgggttcaacctgcgttccattaaaaaattgtcttctggagaaatttttatgggagggctgtatggcattaaccgtttccgcccggatgatataaaatacaataaaaaatgtcccagcgtgatgtttacccgtttgttcttgttcaatgaagaagtaggggtgggtgaggaatatgaaggtagggtgattttggataaggcgttgaacaaggtagatcagataaaattgagttatgagcagaatatgttcagtgtacaatttgcttctgataactatattttgccggaaaaaacggagtatgcttataggctgaaaggtttcaatgaggattggatgactactacctatgacaaagtgacttatactaatctagcccccggaacttatatgctgaaagtgaaagcagtcaacagtgacggatatggtggagatgaagaagcttcattgaaaattgttatctatcctcctttttggcgttccgtttgggcatatattgtttatagccttttggtggttgctgtattggtattgggatgctattgggttctgcgtggagaacggaataaatttaagatacagcaaataaagcaagaaatagagaggaatcaggagaaggcagatatgaatttgaagtttttcactcatgtcagccatgaactacgtactccgctcactcttattatctcaccgttggaaacgctgatgaaggaatatcaatcggatgctgttctgatggataaattaaatatagtgcaacgcaatgcggtaaggttgttgaatcttgtaaatcagttgttggattttaggaaaattgatgtgaatggatattatttaagtttgtctgatgatgatatcatctcttatattcatacgatttgtgattcttttatctctttgtctgaacagaaagatgtttctctcactttttattcagctgtttcctcattgaatatgttgtttgatggggataaaatgagggaagtgatgatgagtctgctttccaatgcttttaaatttacttgcagtggtggaagagttgatgtgtttgtcagtttagtggaaggacaggattctcgggaaatgctggaaatcagagtggctgatacagggatcggcattaaaaaagaagacagagaacgcattttcggacatttttatcaagtggattatccggatatgagcttctcaggtggcggaggtagtctgagtattgtacgtgattttgtcacgcttcacgatggcacggtgaacgtaatggataatacccctgtcggttgtgtttttattatccatattccagtaaaacgttctgggggtaaaccgatgaagatagaacaggtgcaagttgtagataagtcggtagaagatatttccacacttcaagttccggagtcttatgtggcgtctaatgtcggggaggaatcgaaagaagaactgaaccatataataacaatagaaggactggaggaggatattcgaagattagaatctggtaatacggaagaaattgcagaagaaaaaaatatagaaacaatctctgccgttgctccacaaagagcaacggtgattcaattggttgagggtgagagtaatgagatgataactcatattattccaccggagggggtaccggaaatggtgaccgctgttcctgaagaaaaaagtgaactggagttgaaaacggtttggaatcatgcttatattgatctcaaacctagtgggactgccataacttcgatggatgaaaaactgataaatcatgctgtgaaatatgtagaggataatattgcacgcagcgatttgtctgtagaagagctaagcaaggaattagggatgagccgcgttcatttatataaaaagttattggctattaccggtaagacccctatcgagtttattcgtataattcgtttaaagcgggctgcccaattactccgtggaagtcaacagaatatttcagaaatagcctatcaggtgggttttaataatccgaaatatttcagtcgatattttaaggaagaatttggtatactaccttcggctttccaatataaacaaggtagatagttttcaatattttatagtgccatttaaggtttgtatcggagtttcgtcaacagacatacgttctgtaacagatttcatctatgagtaaaaacaattccattttattattgtttttattaataatagtcatacgttaaaatcaatatagaatggaacatacagttatacatgacgagaaagtagaccgtttcgaagtatttgaatcgggacaaatcgcctatttgcaatatgatgaaaagaacggagttttggatatccttcatacaatagttcccccacagttggaggggcagggaatagctcaggctttgaccgaggccgctgtgagatatgcttcggtcgtagggcttaaaatacgtcctacttgttcttttgcaaaaatgttttttacccggcatacccaatataaagacatgttggtggagtgagaaataaaatcagacacggattgtataaacaccgtgtctgattcgtttttagctctcttatctttatatatacctttaatcacattgtttgtgtgtcataatatccaatactagtttatcggtttcattcataccttgtgaaccgattctggtaaggttgcggatgctacggtccacatcattatcaatgataccttctacagaagatacgcatttatgttccatcgctaatatggctgaaaatacagcggtagagacaccgctgcttaatttcagagcacaactgggtttggctccgtcacaaatcatacccgtcaggttggcgatcatattctgtacagcaaaagtgatttgctcataagtgcctcccatcaaataagtgataccacagctagaacctgttgcagctactacacaaccgcatagtgcagacagacgccccaagctttgtttgatgtaaatcactgttaggtgactgagtgtcagtgcgcggatcaattcttcttctgatttatggttatcttcggcatagactactaccggtaaggtagctgtaattccttggttcccgcttcccgaattgctcatgacaggaatcatggctcccgccatacgtgcatcgcaagctgccgaggtataagaaaggatgtgggtaaatgtattacttcccaatatttgttcttcacttttgctacttttcagaattttgcctaattcgtgaccgtagtttcctttgaaagaacgttctgctgccgctttgttcaaacgtttggtttcaagaataaaacgaatttcatccaatggtgtggtggtggcaaaatcgtacacttttcgcaagttcaactccggtttttttgcatcctcattgcaggcggcggtagtttgtttgtttagtaaaacttggttgttaaaggccacatatataaaattggtatgcccgcaagcaataatggccgttgctttatcaccgtcagcttcacagataatttcgatatataacttttcttctatattctctttcagcccgatagagatagcttgtgagtcaattagttttttaccctctgctacggcttcaggagtgctgtcttttaagacttccaattgatattcggatttcccgattaatgcccctaaggcgatagcgataggtagtccaatcattcctgtccccgggatgcctactcccatggcgttcttaagaatattggcgctgagtaaagctttaatcctttcaggtcttttacctagtgtttctgttgcttttgctacacaaagggctacggctatgggttctgtgcacccgatagccggaacgacctcgcgatttataagggcaatgatttgctctctttctggtttggcgatcatagtagataattattaaggggtcttgcaaaaatctttttgaaagtgtatcaaaactcgaataaaactatcatttcgtttgtcttttccttttcgttgattttcagaatatttttcattaaagaatattctgaatgaatagaatgataggtttatttagttttgacaccccttcgacttttgacacactttggttattttttatagttttgtaatccggtctggaggaagtcaacatatttatctatatcctcatcatatgaatatgatttattcaacggttttccttcattgtcaatcaatacatagaaaggttgtgcgttggcaccgaatttagaacgttgcaagtaactccatttatcaccgatcgtgcgtagtgtacgttccttaccgttttccatcactttgatgtgttcgggcaacggggttttgttatcaacgaacaatgttatcagtacatagtcctcagtcatcaacttgtttactttcggatcagtccatacagcggcttccattttacggcaatttacacatccgtaacctgtaaagtcgagcattaccggttttccggtacgttttgcatattccataccggcatcgtagtcatcaaactgcgcatgtacttcattggtatataagttgaagtcttgtgtattcatgggaggagcaaatgcgctgacagctttcaaaggagcaccccataagcccggtaccatatatacagcaaatgcaagtgagataagagccataaaaaaacgggcaacacctactttatcatcatcatcatcgtgagggaatttgatcttacccaacagatagaagcctagcaaagcgaaaatcacaatccataaagcaaggaatgtctcacggtctagaatcccccatccataagccaagtcagcaaccgacaggaatttcaaagcaaacgcaagttcgaggaagcctaatacgactttaattacattcatccagccacctgatttaggcatggatttcaaccaggatgggaacatggcaaacagagtgaacggtaatgccagtgcaatggcgaaacctaacataccgatggcaggggcaatcacactacctgtggtggaaacttctactaacaaaaagccgatgatagggcctgtacatgagaatgaaaccaaagatagggtgaatgccatcaagaagatacttaacaaaccactggtctgttccgctttactgtctactgcgttgctccattttgaaggaagagtaagttcgaatgctccaaagaaagaggctgcgaatacaattagcatcaagcagaagaatatgttaaaaatagcatttgtggaaagtgcattcaaggcactggcaccgaatattaaggttatggcaagacctaataatacatagatcactacaatagaagcaccatatgtccatgcatcacggattcctttctttttgtctttgctacgttttaaaaagaaacttaccgtcattgggatgataggccatacacagggcgtaaataaggctagtaatccaccgataaatccggcaaagaagatgtaaatccatgaacggtcttgttgtgatgtcgtttcgccaaatgcgttcaactcttggataaccggagtccagtaatcttggacagcagtgtcattgccgatcagggcggcagttgtagcactatctgttgcggtagttgcagtagctgtttccgctacaggaacttccgttatggctgtttctgtttttgcgggttcagtagtcttgcttgtagtagcagcggcaactccttttccggagaaagagaaagaaacttcagtaggaggcagacagttttcatcgttgcaggcaccgaattccatataaccttctatcatataggtagcgccagttatttttagtttctgaatgaaaatggcagtgttctcaaagtaacgtaatttcatttcaaacaccttgtcgaagttttcaatttctttaccttgtggagtgagcttccctactaattctactccttctatcttgtctacgttgaaagtagcggagataggacctcccgaaggaaggtccgtggaataaacgtgccatccggcgtcaatcttaccagtgaatactatttgtgcttccgtatcggaaatcgtctttaactcggttttgaattgtaccggatcttgaatctgggcaactgccggaagcaatgccataacgattaagaggcaacttaaaaaaaacttctttttcattacgtattatttaaattttgattaatgttcataccgcaaagtaagggataatatcttagatatgtctctctatacctatataaatatcggcaattgctgttttcagaataaaaaatagagcaaaaagataatctattgctctttttggagttccataactttgtttctatattgggagggggtcattcccacagaggattggaaaaggttataaaaggtggaaatggagttaaatcccaactctgcagaaatggctttcatcggagtttcgttattggggtcagataataggcggatagcttcttcaatacggaaacgatttacataatgagtgaaggataatttggattgctcattgatgatacgtgataaataagtacggttagttcctagtatttccgctactttgtcttttgttataaaattgtctttgtaaattttttcttctctcataatacgctctaatgtacggaaaagttctaaacttttctcatcggtgagtgaggaggaagcatacttttcggaagtagaaaccatggagggggcattggtctccaattcttttatacggcgattcagttccgtttctcttttgattgcttcttgattttgcttgacaatacttaaataaagtttgtttttacggcggtagaggtaataaagcaaccctaaaacaattacagtgataataagaataaatgtttgttgctgtatacgctgttctttctgcattacatctagtttgctttgttttattaaattttcctgccgctcagagtcatatttgaatcgcatttcgcttaaatctctttctttgtccttgttgaaaaggctgtcgttttccaaacggaatattttataatacttcagtgcgtcatgatattggtgcaattgctcatagcaggtagacagattttcgtatagttcattgcgatggatggcgttgacgcgtgcataagaaatagctattccttgttttaacaataaaatagcttctggttgtttgttttgctgcattagtatacgtgcatatcccaaatgggcatagacaatagaggaagtttgtgccgcctgtttatccttcatggcttttttgtaatattccaaagcctgagcatattcacccatatcatataatatattgccaaagagattataggtatgggcttggtcgtagaaatcattttccagcatcaatgtttcggcttcatggatatatttcattgcttcctcattctgtttcattaaaaaatacatataggcagaatttactgcaccggaataaatgatgtatggattacgcatactgtgtcctaattcataacattctaatgcgtatttgatgccggctgtatcttttttgaggtaatagatatttgctaaattgcctaaaagcaaagcgtattgttgttggaaattattttgttgtgccaattggatacctttataaagccatcgtatggcacggtaataatcggtttcaatatttgctgaatagagtccgagactaccatagacggaacaaagggtggagtcattattcagtttggttgctaattcaagagaaagattcaagttttttttggctattttttcccgtccgctcatcatttgcgcttgtgcttggtagatatatgaatagagttggagtagaggatttttagtcttgtccgctacgtttttcataatctcagcgtaagtgatggttttggaataatctcctttatttaaatagtattggcatagaaattttaaggcatccccgttatcaggttctttcctaatgatttccaactgtttctcaaggatgacggggcgcttttgtgcatgtacacaaaaggatatccccaaaagtaacagtaagaaaagacattttagtttcatatgcttttttcgattgagagtgcaaatataataaaacctttaatttttcttgttcaaaagtcttgcatatttaaaataaagtcgtacctttgcaacgctttcaacaaaagcacttctgaaaggaagtttgggagaggtggcagagtggtcgattgcggcggtcttgaaaaccgttgtactgcgaggtacccggggttcgaatccctgtctctccgctggaaagaattgtaaaacaaagaaaatccctgtaaattaatactttacggggattttttattttttgatgtatagtaaaaataggcatatcaaagtattctttcggtgtaccttattacggatcacctgtaaaatatggagagtgttgcaaagctgttttcatttcgcatcagaaagcatacttttgcatggaactatacatacgtatgtgcagggttatatatgtgtacgtacagtcttatgcgtacatatgtgatatcctcatgcccaaaaagtgttttttaaaagatcaagaacttttcaaaaaagaagacgacctttttaaaaaataacaggaacttttttaaaaacgtcttgatcttttttattgctgccaatacatcgtaaaccgtcattctgtggaggtacaaacttttcatgtgtactttttgtggggaaaaagcctaaaataccctactttatatcaagccgaaacaatttataaaaaaagaatatatagctgaaaacaaggatgttatgtaaaaatatgcttcaaaacgttgtgagagtatgagaacatgaataagagcaagtatttttatccttactacataaatagtttataataaacctgttatatatgcagtgagggtatgagggtatacatggttcgaacttttcttagaaacatgcaaaacggctatattccacgatataggaatatatgccgttttgatagaggggaaatttttttatggtatataattccaataatccatatttgtaacgatttgaactataattttacgatctccttctcgtatttcgttgggagcattctgagatgcataagatatttttgcgcccactccttttgcttttaacattttattgggaactcctttctttataagtgcattgactacagcgtctgcacgtttttgggatagttccatattgtattgtgatgatccttttgcatcagtacatcctgtaatgagatattttttgcttgtgtctgtcagcataatttgagctatttcatcaatgatagtagctgctttaggagttatttctgttttatcaaactcaaaatagatattgttgaataaatcacataaaacattgggctggtttggagtctctacaatttgtttcatgattataggtttttctatttctttttctatgattttttccacatattgaatttccggtttgacttttagggatttaccaccaatgcgccacatcaatcgaatgcttccttgccatgaattggctatatgtttgtatggcatgatgagatagtctccttggagtcctatgccaatgttgtcattaagccacatattcacgcctattcccaatgaaatagggataagattttgtttatccttcccttctttagtataatcatttgacagattccatcccatctcctcactgttgaattcttccatccccttataattgatcttaaaattcttgtacatatagttgacccccattcgaagaaaaggatcaatataatttgaatggaaatattcacctaggcgccactgtaaaccgattcctgtcatacctagccatcttgattccttaccgttacggacaggatcggaactgtagtctaatgttccttgtaaatctagataaaaatgagagttaagttcacgagcaaaatatagatttcctccgaaaatgaaatcttttttgttagtacctacagtgtaaccgcctttattattagtatggaaattaataacattaaaacgtgtcatttgaagtccggttgcgcctatacctatttcccatgcttttttattattatcggttgttccattctttgcgcttttttgtgcatttataggtaaaccgaaacataatactgaggtaaagcatagtatgagatggattttatgtatatatattttcttcatatttttattcttcatagataacttgtacttcgggcaactcataagagctgttatagttttcaataataaatgttttttcatcctttccttttcggagataaccttgataatatctatagaaatatgaactattgccattgtcaatgtatatggatgaatttaaaaacggtgcgaatactttgaacgttggaacttctgcagaagatctgttattagaacttgatgcttcttgtgaaccagctgttgaggtatatctgaatgtgatatatgccattttaagtttgttggcttcttcttcagtataagctatcggttctacatagtccattccattttctttaacgacacgtgtggtcgatgatttgtaaattcttgtaaagtctatttttgaaaaatccaattcaccttctgcagatgagaaactgggtgcttctccattggatattatttttaattttaatgtttttagcgtaggtcccatttgataaggagctaataaacaaataccattccattggaaagtttctccataataaggctctctagcttttacagtgtaataaacgtcacttccatcccaatattcagattgattgtttttgaattttccgggattttcttgaatgaaccgataggtataaatatagtaataatatcctccattatttgaactagaattttggcttgaatataattttttgtctgacaaaatactgttgggattatttttatcagagactctatatgcgtctaaattccttgaaccactattaggtaaataagaagggatattttgccattggtcttccggattaacttttcgttgtatatagaaatatagatactgataatcgtataatgaatttgaattatcgcgaaggatcattctcatgcgtactctattgggaacatatgtgtttttagcggattcttgcggtgtctttccggctagggttacttcttttaccgttccccagcgtaagtttatgtcttgtatttcgggtaaatcttctttaggtacaataaactctccgttttcattggttatgtaagttttttctgcattgatacccggcataccttttacttgagctttgggtgcgatttgtccagtttcatcatatactttatagagtacacctccatcagttgtgcgtacatattcaccatattctgattgagaatattgtgcaataacattaggtatacccttaatgatggtaacttctgttcccggttttcctggttctccgggtttgccgtctttgccatcttctccgtctttgccatcttttccgcgtagatagtcataaaaatcatttaacgtatttttttcacagttccatactccaccatttttgtgatcgataagtgcgtctgttgtaccacaacgtttagctaagtcatttttccacagttcatgtgctgacaaaccattgcttccgtttattccgtctttaccggctaaataattgaaaaaatcatattctgaaactttgtcagaaggccatttttgtcctggatttttaggatcattaatattgcctgttcctacagtttctttccatagttcataagtggattttccattgttaccatttgttccactgaggtaagtatagaaatctgccattgtaattttatctttggcccatgctgaattatttttgtctttgattttgtcatttttgacatcattcacccataattcgtatgcagatgctccgttaactcctttttctccttgagcttttattcctgtatcagtagtacctatccaccaatttccgttattacctatatggggagatatgccatcatctcctttctctccttgagcttttatttttgtatcggtagtacctatccaccagttcccattttttataaccggggtaagtccgtccgttcctttatcaccttgttctcctttggggccttgcactgcaatccctgtattggatgtgcctatccaccagtatccgtctttaatgaaaggggttaagccgtcgcttcctttttctccttgagcttttatttttgtatcggatgtattgatccaccagtttccattaggaccaatataaggggatgctccgtctttaccattttctcctttttgaccttgagcgggaaaatttgtatcatgattgccaatgtaccaattaccattttcaccaacatgtggagtaataccattttcaccatctttcccttttaaatataaaaagaaatgttccattgttgtttggtttttgggccaatttatattgccgtcagcaacagattgtttccataattcataagcggaaagtccgtcttttccattaattccattctttccatctttgccgatagctttgatttctgtgtctttattgccgatataccaatttccattttcaccaatatgaggtgattgtccgtctcttccgctaagaaaatcccaaaaatcggcttctgtattttttgaagagggccaaatgagcgaagggtcatgagggttggtgacattaccttgggtgatcaggattttccattgatcgtatgcagacattccatcttttcctttgtctcctttttctccttttatataaactaaaaagtctgctaaatcaacttgggtggaaggccagtttatatgaccggtttcaacttcttctttccatatctcataagcggatttgccattggttccctgaggaccttggggtaattcaaaatcaatactgctgcacgagaaaaaaaatgtgcaaagtagcactgataatacataaattttgcatttcttttttgtatacatgactataaataattaaaaatgaattactttttgttgttacatatttgataaactcagttctgctttattgaatactgtatcgttgggggtgttcatgcaattttatattttaggttattctactgtgtgcgatttacattataataatattcacattttatttaggtgcaaagttctatatttggtgctaaaaagaagttgcgtatttaaaagatttgtttgcatataatcaatcttttcttttatatctgcataaaaaggtttcctatttttcttaatgttcgtttttggatagttttaaatggtagatacttcatatgattttacataaggagtatatgtgataagttttttcatatattgatggtggattatgattaagttttgtgatatttgtttttatatgacgtatagaaactcttaaaatagatccatataccgagatcaggaaacaaacttattcttagcttcagtatgtatgatggagataagtatattcataatctttaggatgcgggatgtttgtttaatcgtttgcggaaacagaatatgtttcgagaggaggtgtaccttttgattcttctccttttttacgtatttcgttaggagtggctccaatattccttttacagtaggtcgtaaaatgggaaaatgtcttgaaatgatagtccaacattatttgtttgatgggtagggtactttcttttaacttgaattcaatttcataagatgtttgcttttgtaaccattgatatggtgtatctccatgaaagttttttttgaataactgtgtgaaaataaggtcgttatatccgcatagaatagctaattctttggcagttctgcaagctttgtaatgtgtcatgacggatacgaaaaactgaagatcattcgaaagggcataacggaaaatggaggcaatttcgtttttgctatagcaaattttaaataatgagaacagctcatattctttggctcgatgtaagtcgggaatttctgttccatttttcatgtaatcgaccagcaaatccaagtaggaacgtattaacggataaatgggaagaacttctaccggttttacttcttcgatggatatgtcttgtagatattctattattctgctatgtagataaggggccacaatattacatgcatggatgacgagttgtacatcatccattgttttgattttacatttatgtaagctgctgataaagaaaaattcattttgcactgctatcagaggcattgattccatttgatctctgaagagacataaagatccttttagtacaaaacaaacttggaattcatggttttcattcagattttggataatttctcccttgcctatatgaagatatctgaattggctgaatctggatagtgcaagaggatcacggtataaattctttagtaaaaatagcatttccatatattataaacattttaagataaaaaaagttttgatatatctatcccgggcaaatataacttgatatttaaaatgttttaaagctatagaaggaatatgcaactaaatcattgctaatatgaaattgaatcttctgtttaagaaagagtttatcaacatatgaaattataaggtatttaaggccggatgttttggatagtagcttataaagtggaagatgtttactgattttttatgagtgaatgtaaataagtgatttggaatggagaaaaatttaaggatcttttccttattgttatcttgtaaacaataaggaaaagatccttaaatttaaattattgctggtattggccattcactataacatttttcatacgaatattgtgaaaagcatctttattccattgggaaaatttagtttcgatctttacatctttaaatgaaaaattggataactcatactcagcttcatttttattcacatttagaaatttgtcacatttcagttctatgttgtgcatcgtgatatggcttccgtaggatttaggaatcgttgttcttcctttcaagtcataaaattgtttccatgacgaaactcctagtaaagccttgcagaagccttttacattttctactgtgatgtattcatagtgttgcggagtatcaggccgcattttcaatagaagtagttcattaccgccttctgctctgcaattgcgcattaatacattatagacatggatggactcgctgccacaagtcatgcaactgccagtagtatgatcaaagaaacaatcttctattagaatgtttttattgggaccgttataagtatcctgatcggcataaggtccttttccacctttaaagcagatggcgtcatcatttacagtaaaccggcatcctttaatatgaaaattggtacatacatccatatctataccgtccgcactagctgattttataggtttgataggagagaaaattcgtagattgagtaatttcactttatcgcagcgataataatggctggtccaaaaaggagagttctgtaaagtcacatcagcaacctgcacattacggcaatgagctatgtaaagtaggcgtggtcgcatttcatccttgtttgtacattgaggattccattcgcgacgtaggcggaaagctttccagtagggagtgccgtttccgtcaattgtacctttgccgctaattgtaaaggtatctaacccgtcggcattgattaatgcaccgaagtatttgcagtattcaccttcaatgcgagtcatgaggagagggaaatccataatgttctcactacctagtaaggtggcgccttttgacaaataaagatgagtcccttgtttgaaaaagagggaaccgcttttataaattccttcagggatgtaaatgaccccaccgccattggctgccgcttcgtctatgatcttttgtattttttgtgtttgaacgatatggggattgctttcaattccataatcggaaaggtcgtatttttttcctaaggagtcaggatggaccactttagtttggagaaaccattcggagataggagtaccatcaggaaacacattttgttttctttgttctttttttgccattgagggtactattatgctcaagcataacaggagtgatagtaattgtttcataaataagtttttcatttggttcatattatgtggatgacaaagaaaaacaataacagtcaattgtatctgtatttattgttttattcaatggaaaattgtacggcttgattcttttcattaaggcggatggttgtgatatagagagattccttagtctggaaagaacaatttaggagcctttttttatctgcacagtcgtttctccaaacttataaaagcttgaataaatcgcgctttttgccctgtttatactattttccatctatgtagattcttttccatattttcagaggtttgtggctgttccggctattttttattcatggcattatatctagttttgccatgttccttgatgaagaaatgaagggattagattttatgtataactttaattaattacaaatgaaagactcggagaacaaactatcgggaagtatgcattcttttaaaaggatgctttcctttggtattcttatggtaattgcgatgaccctgtttgctcaggttaagaatgtatcgggcgtggtgcttgataaaaaaggggagagcataattggtgccagtgtattggtgaaaggtactactaatggtacgattaccgattttgacggtaattttgttttgaggaatgtggccgacaatgccattttgcagattagttttgtcggatatcaaacttcagatgtatcagttaagggacagaacaatattaaggtggtattgtcagaagatactgagacattggatgaggtggtagtcataggatatggctcggttaagaaaagcactttgacgggtgcggttgccaaaatggattctaaggcaatagaggatcgtcctttggctcgtgcagagaatgctttgcaaggtcaattggctggagtgacagtacgtaatacaacaggtgagccgggagccgatatgcagatccgtgtccgcggtgcggcttctgtcaatgcaaattccgatccactttatgtggttgatggggtgcctatgaatacgttgagcggattgaatccttcggatatcgcttccatagaagttttgaaagatgctgcttctgctgcgatttatggttcacgtggttccaatggagttgttttggttagtactaaacaaggtaagagtggaaaagcgaaggtggcgttcaatgctagtttcggtgtacagacattagagaaaaaaatggatgtgcttaatgcgacggaatggatggaatttaaattgagatggaatgatgcaaactatttgcaggaagcgaagaaattgggtttgactagtgccagtataaaggatgataatgccacacgtttgtctaatctcggaattcaggcaggtacggcaaactcttatctggttgtttttgatgaacgttggtttaactatttgggagatgacatgaggaatgcgcatacttatactcccaatccggaacaacttagcctgttggattggcaggatgagttttttcgtaactctatcgtacaggattatagtttgaatgtttcgggagggacggaaaacacatcttatttattctcaggtggatatatgaatcaggctggtatcgttaccggtacgggatatgaaagattctcttttcgtgccaatattgaatcaaagataaacaaatatcttacaataggtatgaatatggctcctacgtatattgtgcaggatggttccggacaggcaaatggtaaggattcccaggtacatcaggctttgtatgctacaccggtatcggaaccgggggtaggatatatgacaaatgttgatccgaatccctattatctttgggcgggaagcacatcgagtccggtttataatatggagaagaatatcaaacagaatagaatgatgcgtttggttgggaatgctttcgtacgtatcactccgtttaaagatttcagggtagaactttctgcttcggctaattattatgatttggatggaaatgattataagtacactagtacaaccggtagttgggcgcagggagaaggacaaaactcttcgggggggcataatacggaaagaaaatggagtactcttttgcaggctcttgcaaattatgaccatgtttttggcaatcatggaattagtgtaatggcgggtttttcttccgaacagagtaatcttggtttcagtacggcccaatcttttaacaaaccatttcccaatgatgccataacaggttcctttgatggttcgaaagttacagcaggaactaatacggtaacagagaaaacagccaataaattgttgtctgtgtttggacgtttgcaatataattatgcagaacgttatatgttgtccggtagtttgcgttatgatggcggttccgtattcggagctaacaataagtggggcatctttccggctgtttccggaggttggttagtgtcaaatgagaaattctttaaaaattggggaatgtcttggtggaatacattgaagctgagggctagctatggtgtgaccggtaataattctatcagtaacacggctgcttatcctactttgtctgcaggaaattatgcaggtgctcccggttataaggcaaattctttaggtaatgctgatttaggttgggaaaaaacacatagtactgatgttgcgcttgatttaggattcttcaataatagaattcaattgtcgctggattggtataccaagaatacgactgatttgttatatcaggtacctgtggaaggagcttccggttttactaccgtttgggataatttaggagatatccataatgaaggctttgagatcgaattgaatacgcataatctcacaggaaaattttcatggagtacgtcattcaatatgtcatataataaaaatgaggtgaaagctctagggaaagataatactccggtatattcgggatttgataagaacaatccgtctaatattctgactgtgggaaagcctgttaatacattctatatgtatgatgcaataggtgtatggaaaaatcaagctgaaattgatgcttacagtgctgcccatggaggaaagccggttacttttgaaggaaaacaaattgtaccgggtgatatccgatacaaagatgtaaataatgatggtgtgttcgataaagataatgacagggactatttaggtagtcctactcctaaattagtatttggaatgacgaatacttttatttacagaaattttgatttgtctatcttgatgacagctcagacaggaggaaagatttttggtgtattgggacgtgccattgaccgtccgggtatgggggctaaagggaatgctttaggacattggagagaggcatggtggtcggaagatgagccgggcaatggaaaagtaccttatattttaagttctactacaggtgctacgttagactcccgatggttatattcttccaattatctgcgtatcaagaatttgactttggggtataaattacctattaatcctaaatttatttcctatgcacgtgtatatgtatccattgaaaatctggctaaatgggatagttattatggagggtactctccggaggcggccaatacggcagccagttcctcacccggaggtagcagtgctttgggattggactatggtggttatccttcaccgagaatttacactttgggtatcaacgttaatttctaataaaaatatagagctatgttcaaattgaaaaatatattgcaattgagtgcattgatgttctttgttatgtcgtgcgatgattatttggaaactcctcctgctgatttaatgacctctgatggtttctatcagactcccagtcagtctgaacaaggggtggtaggtatttattccgatttgcgtgaacttgccaattcagagtatttattgatgtctgaatgtcgttcggataatgcatggacagaaccaagacctaatgggttgagagatttttcagagataagcacattcagagctaccagtgatttggcaacttttaatagtgtatggaatacatggtataaagtaatttatgatgcgaatactgctattgccaaaatagcaggatgtaactttgaatcgaatgataagattaaaaagcagtttatgggcgaagtctattttctgagaggatgggcttattttgagttatcacgcctttttggtaatgttccgattattgatgctcctttatcgcctagtgaagtgaagaaagtacctcaatcgtctgcacgggaagttttggataatatagtggttcctgatttgattaatgcgcagacgatgcttcctctaaaagaaaatatggtgagtgcgaatggaacttcgattgtattgcaggggcgtgcggacaagatggcggcagaagctatgctggcacgtgtgtatatgactttggcgggtttcccatattatgattccgatgccaagatattagctaaaaagcaattggaaattgtgttgaattactcaaaatccaatcagaataaatattgggctccgacacttgatgaatggagaaagcagtggatgccgagcacggattattataataaatactctatttttgctattcagtatcgtacgggaggaacaggcaacagcgctttgtttaatttcagtatggctctacctccttcctatacgaatagaagaatctttggaaatgaaatttatgtggaaaagagtttgatgtatgaatttgataaaatttattctgatgggaaaaaagatggaagagggaatggtttttctgttctgacaggatatgaggcagagcctaattatccggcttatacgaatacaaaagagaaattgattttggaagatggttcgcaagtggatgtttatacaaaatcaatgttttataagtttatgcctagtaaacggaagatagcggaacttgggatgtcactgactccggaagtcacaatgaaagacgataatgactggcctgtaaatcttcctattttacgcttggaagatatgatgttgatgtatgctgagttattggttgaagaaggtaaaataatggaagctgtagcttatgtgaatgatatccgtaaaagagccggttgtgatgaggtgaatacggtaagtgctgcagatgctttgaaattgataaaacgggagcgtagaatagaattaatgggagaaggagtgcgttggtttgatttggtgcgttggggggaatggcaaacggaaattcaaagtttatttgatagttatcataatccggatggtaccgataagaataatgtaaagacaggacgttatttatatcctattccattgaatcaattaaatgtgactccgggattatataaacaaaatgagggatattaagtatataagttaaacaaagttagttttgaaggtgaaaaggtaaagaggtgtgtcaaaagctatttttgataattgctttgttatgtggcacaccctctttttatcggaaaatagagaagtagattatttatgaaaaataaaaagttgcttattgccattttgtgcatatttgtatttgatttgccgggggctgctaatcgcattcggcagaattttgactttgactggcagtttagattaggagaaaatggagattttagagaggtacaattaccgcatgactggagtgtggagttggattttgatgaaaaagcaggaggagcgagtggttatttgccgggtggcataggttggtatcgcaaatcttttatgattccggcgagttacaaaaatcaaaaagttagtcttgtttttgatggtatttatcataaagctactatttttttgaatggaaaggagattgcttatcatcgttatggatatacttcgtttgaaacagatctgacccctttcctgaaatatggagagagtaatgacttgaaaatcaaggtagatcattcagaaatttctcgctggtatactggttccggcatttatcggcatgtctggttgcaagtgactaaccctgttcatgtaaaaatgtggggaacttatgttacgacaccagagataactgaatcccaggcaacggtcaagattgtcactactatcgaaaactccatggagttaccgacaacagtgattgtccagcaacgcctgttggatggtgatggaaaaattgtaaaagcagaaggtaaagaggtgatggcccggactacgttgaaacttgataaagaaaaaacagctgaagtagttcagaatttgttagtcagccatcctaaattatgggatttggattttccctatcgttatacggtggaaaccattataaaaaaaggaggaaagacaattgataaatatctgactccttttggaatacgttcagtgaaatttgataaagacaagggtttttttctcaataacaaacatcttaagctgaaaggcatgtgccttcatcaggatgcaggatgtttgggaacggctgtaccggatagggcttatgaacgccgtttgcttattttaaaggaatttggcacgaatgctatccgttgctcgcataatcctccttctccggaatttcttaactattgtgattctattggctttttggttatagatgaggcttttgataaatggaaatcgggatattatgaagaattttttgattctagctggcagcaggatatcagcgatatggtaattcgtgaccgtaatcatccttctgttatcttgtggagtataggtaatgagttggctgaggcaaaattaaaagatgatacagggattgaacgtgctggtatgttgcaggattttgtacatcaactggatccgagccgtcttgttatgctcgctttgcagccgggatttgaagataaatttgcttcggtgacagatgtactagggtataattatatggaacctcggttgatttatgataaaaagaaatacccggaacgtatttgcctgatcagtgagagctatccttattatagtagcatacgtgaatttgattcacgtgattatgatgagaaaaatccatggaattatgtaatggaacatgaatatatttgtggctctttcatgtggaccggtgtggattatattggggagagttcaggttggcctagtaagggatggccttctgctccgtttgacatgtgtatgtctgaaaaacctagaggaggatattttcgggctttgtggaatgagaagccttttttgggactttatgtcatagattataatttggatgaagatccgggtaaagaccattggcaagcaccgggaatggtacacgattggacttttccttatcaggatgcgcgtgtcatgcagattcaaacgccgtctaattgtgacgaagtgatgttgatagatcctagaggaaaggtatatggacctagaaagccacgggattatataaataatacgattaaatggaatcaaccttatcgtccgggtaaggtggtggtgatagggtataaagatgggatagaagtgtgccgtgacagtatacagacttccggaaataaagctgtccgttttactctgaaagcggatcgggaacagttaaaggctgacgggcaggatttatctcatatctctttgaatttatatgatgaacaaggcatccccatacggatagatgacagacaagtgaaagtgaccgtggagggtaacggacgtttgatggggatagatagtggcgagatgcgtcgtagtgaacgttttagcagtcatactttacccacttatttgggtcgtgcccaaatagtagtacaggcagggcgtatgcggggacagctcaaagtaaaagtggaggtcgaaggaatggcatcgcaggaacttgttctgcttgttggttagtaaaggcttcctaattaaaaaaggtattttaaaaatcacttttaaaataccttttttaattttgcggtattattctgatgttaaaccgaatgatatgaaaaatcgtatattttttttgttgctcttctttgtttgtctggaatggaatgcatatgcagttattgatatacaatctattcatattacatccagtgacggattggccaataatacaattagagatatttttcaagataagaaaggctttatctggattagtaccactaatggactgagccggtatgatggtcactcttttataacattgttaccggaaaaggatagtccgatttcattagcggattatcatgtcaagaagattgatgaagataaaaatggttttttatgggtgctttctacttcaaatgtattcagttgctatgatttaagacataattgttttgtggattttacaggatgtggggaacacgaccaagcttatgcttatcgtgtagaaactgctaatggtgataattggttatgggatggacaaaaaggttgcagaaagatttcatttgaaaatgaacatttttcctctgtgacatttcaatgtgaaaatggcaaactaccttctaataaagtgaatagtttgattgaagattctagagggaatgtttggatttgtactcaggaaggattggtgaaagtaacaagaaacaaaatcgaagtaatttctgatatgcataatttcagagcagcattttcttatgagaacgcatgcttttttcttgctgataatggtgatatttatgtttatgatgaggatgaaaaactacattttgttcaaagaatcggaaaggatgacgttgactttcattttactactcattttggcacgaaagatgattggtggctttttacaacaaaaggaagttacaggtttcatttatctacccggcaggtaagattagacaacccgattaatatccccaacgctcgttttgtcagagataatcagggggatttctatgtttttaatcagaccggtgtgttgcattattttcagaaggaaaccggaatatgtaaaatactgtcattgatagatgccgctcagatgatgcctgctgccgaggaacgctatgaagtaatacaggataacagaggattgatatggatatctacttttggctatggtttatttgtgtataatccccaagaagatataatcagccattacacttatcaggagactggtaaaaatctagttcattccaattttctgcatagcttattactcgatcactcgggaaatgtatgggtaggatcggagtttgccggtgttacacttttgtccgtattaagtgaaggatcttatcgtatttatccggaacatgagagtataaatgattatgtgaatgctatacgtacagtggtaaagatgcccgatggtggtttctggtttggtacgcgtcaagggaatgtttacgcttatgataaaaatttggaggctgcatcttgttataagatgccatacaattatatttatgcggcttcttgtgatggagatggtaaattatggttgggaacccgtacgatgggtttatgtattgacggacgttggtatcataaaatggcaggtgataccttgtcattggcacatgagaatatattcgatatttatcgtgatgataaaaataggatgtggataggaacttttgggggaggactgaatttggcggtttcacgaaaagacaggtatgtttttcgtaagttcctgactggatccggtcgtttgcaggaagtcaggatgatcactcaggataataaaaaaaggttatgggtaggaactaataagggattatgtgttttttatggagattccattattgctgatgctcataattataaactttataattatgaaaatggagatttgcccggatatgaaattaaatgtatttttcgtgatagtcagaatcgtatgtggataggaatgttgggaggcggattttctgtttgtaaccctagtgaggattataggaacttgaaatttgtccattattccacaactgatggtttggtcaataacatggtagagtctattatcgaagataagactggaaaaatatggattgccactcagtatggtttatctcgtttttcacctgatacggaaacttttgaaaatttcttcttttcagcttctatgcaaggaaatgtatataacgaacatggcgctgccataactgaagatggacttttgctatttggaacaaatcatggagtcatagtcattgatcctttgaaagtaacttcatctcctatgacccggaatgttattctaactaatttgaaagtgaacggaatcacagtacaggttggtgagaaggattctcctttgacacaggcgttaagttatacacagaatataaaattagattatgaccagaattcattcattatagaattttcaacattggattattctttggcatttccttcaaggtttatttataaattgagtcattttgataatgaatggagtaccccttcttctttgaattttgcttcttataaaaatctttctcccggcacttatcatctgcatgtaaaagcatgtaattctgctgggatatggagtgatgaagaaactgtgctcaatattgttatcacgcctccgttttgggaaaccacttgggcttatcttttttattttcttgtcgttgttattgtgttgtatgttgctttttgtttgatacggaatttcaataatttacggaatcgcattcaggtagaaacacagttgacagagtacaaactcatgttttttactaatatttcacatgaattccgtactccgttgacaatgattcagggagctttggaaaaaatagagagcttgaataagattcccaaagagatggtttatcccatacagttgatgaataaaagtacgaataggatgcttcgtctgattaatcaattgttggaatttcgtaaaatgcagaacaataaactttccttgatgctggaagaaacagatgtgatggtgttcttttatgatatttatcgaagtttcaaggaaacggcagatgacaaacagattgattttcattttgctccttctacgtcatcttataagatgtttgttgatcaaagtaaattggataaaatagtctataatcttctttcgaatgctttaaaatatactcctaaaggaggaaaggttgtttttgcaattatcgttaatgaggaagtggggaaattatttatatcggttagtgacaacggcgtagggattcctaaggagaagcaaggagagctgttttcccgtttcatgcaaagtggtttttcacataacagtgtgggaatcggtttacatttgacttatgaactggtaaatgtacataaaggaagcatttcatttgatgaaaatgagggaggtggttctgtgtttactgttatcttaccgttagattccagtgtttatggaaaaaacgatttcctagtatcaagcatccttcaggaagaatcgtttgttcatgagcagtgtgatacctatttaacagtaaatcatgattcagtgaccccggaccctttgaataaaaaaagaatattgataatagaagatgatggagatgtgcgtaagtttttagaaacggaacttggtatttattttgagatcataagtgaaccggatgggctttccggtttacaaaaagctcagtcttttgaggtagatttgattatttgtgatgtattgatgcctggtatgaatggctttgatgtgacacgtaaactgaaacgtgattttgagaccagtcatattcccattattttgctgactgctatgagcacttcggaaaataaacttgaaggggtagaaagtggtgcggatgcatacataacgaagcctttcagttccagattgttattagcacgtatatttcaacttattgaacagagggaaaagttaaaacgaaaattctctaatgaccctgctatgacaagtcaggctttatgttctacagaactggataggaaatttggtgaaaaattgcagactattttggaaaaacaattggacaacccggaattcactatagaggattttgcatctgcggtgggggtaagccgtgctgctttttttcggaaagtaaaaggagtgaccggatatacacctaatgaatatatgcgtatccttcgtatgaaaagggctatggaacttttgcaggagggtatatacaatgtaagtgaaatagcttataaagtaggaatgaatgaccctctttattttagtaaatgcttcaaatctcactttggagcacccccttcggcttatctgcataaaaaataaataaaggagcgcttgaaagattataatgttttcttatttttgatggatttataccataaaaaggtgactagcacgataaatgcaaggaaaatggtaatcatttctgattggtatgtcattggttccacccagatttcgtggaaggcattccatcttcccataacttctacgaaagtccaaaatacgactactgtagcaatagaaaaacggagagcgtatccccattgactgatatttatcaatcttcggaacataaatagtgatcctacaaggcagccgaatgcaaccaatgcggtgataggatggcggtcacctataaaattatcatcatagcagaatagcaataccatgtaattggtccataaaataagattcagctccatgaaagtaaccagtgaggtgtggcgtgtcatgggacgcatttctacttgtactttgctgttgcggaaaaatacccgttgcagataattgaaaaaatcgcatccgctttttatattgaataagtagagtaacatgaacataatccaaaatccgaaagaagagggcatgatcagatattctggtttggttaccacttctccgtctactatgagtggctgtactccgaaacgatgtgcgtaatacacataaatgaattcaatccatcctgtccaaaataacagacctccgaatagcccccaaagagtttgttgagtatctcctttggcaaatacgcccgttatgaccattattaagcctattaatcccatgaaaaaggttgcgtaatgcatggttaccggttccatcaggtgttccattaagatcatcaatgcatgtcctagcggcatggtaaacaatacaattaggaatgaggtgataccgataaacacatttcttttttttagtttcattttttcttctttctttctatgtgatataaaattacaaataaagttccgaatataagtgccgcccatgtgatactgattactactaagtatcgattatataaatattccccatcttcgggagtatggttcaaagtgcaaagcaaacatcggcacaatggattatttgcgtcgtgggaacaataggagtaaataaggaatgacagactacctataagtagggttagtacagccagaatctctatctttctatgatgaagtgtcttgttcacaggcatttcatgatgtaccagtttaaccatgcttgcttttttttgcaaaattagttatagaagtatatactgacaatacctattaatggtgataaaatccagttttatacctaaaaataagtacttgtgtactttattatatatgtgattattagcaataaaaccccaatttttaggtattgtgtacccttggtagtaagggtaactttgcaacaaattttaaaacataaaataataactattaatcaataaaacaaaagtattatgaaattgaaaaactatttagcgatgatggctattgcattgtgtgcagtagcatgtagtgatgatgataataaaaaggaagataccgtgatcccggctcaggaggttgctggtacttacaatggaacattatcactctcagtatcaggaaatgatcaaggaacgtcagacagtcaggtgaaaattactgcggaagaaggaggaactgttcaagttcttctagttggtggtgctggtgaaggaatgatgtcattgccggatattgctatacctggaattaaagtacagacctccgataatgttacttatacttttccggaaagtgctattgatgtaactgttggtactgtaaaatatacaggaagtttacaaggaacgattaaggatgaaaaagctgatctgatctttacactaaagccgggagccatgcctatggctattactgcgacttttgtaggcactaaatagcatgaaaagatatctctttattatatccatgctgggaatgatgcttttgccattctcggcatgtgatggtattttggaaggaatatatgatagtcctgctgcttcggatagtaatgaattcggtttcataagaacagacccttctacccattcgggtactatttatattgatgctactgattatagacgttggacttttattgatttccatacacaaaaagtagattctgtgaatgtgacagattctgaccagaaagaaccggaggaatgggatattgctgtccatcgttatgacgttaaaaccaatgctggagcagtattggaaaccggtttcacaggtttttccgctttacagaatgtgagtgcgatgcccgaaggagtctatgtggatgatgtttggactaccgctaaggtagccattgatatgtcaggtatgatggatggcaatattgtttatatggaatcctattataatgaagaactatccaaatggttgaatgttgataaaagtaatatgccacctacctatactctttcaaacaaggtttatatggtaaagctgaaagatggaacttatgcggctgttcgtctcacaaattatatgaatgctagtggtgtaaaaggcttcatgactattgactatatttatccgtttgaattgtaaaccgacatacgatatgcatagactactcagaaacgtgtgcttgatattgtgttggctgatggcgataccagtatcagcacaacgaattatttcgggaactgtatttgatgaaaataaagaacctctgatgggagcaacagtctccgtaaaagaaaaagtaactttgggaaccactacggatacacagggaaaatacacattgaaattacccgataatagagaatatactctgcaggtttcatacatggggtatatctcgcaaactcataaagtgtctgtcagcaaaacaggtaaagttgattttatactgaaagaagatgctgtaaatatggaaactatagttgtaacaggaacccgtactccgaaactcctgaaagatgttcctattgttactcgggtcattactgccgatgaaataaagaaagtagatgccacccatattggagatttgcttcaggcagaactgccgggaattgaattttcttattccatggaccagcaagtttctctcaatatgcaaggatttggtggaaatgctatactttttctggttgatggtgagcgtctggcaggtgagactttggataatatagactataaccgcttgaatatggacaatgtggagcgtattgagattgtaaagggtgcggcttcttcactttatggttcgaatgcggtaggaggagtggtaaacatcataagtaaagtgtctgcggagccttggactgtgaatctcaatggacgttacggggcttataatgagcagcgttatggaggaacaataggtttcaatgccggaaaattcaatagtgtgactaatgtacagcatacccaagtagatgaaaaagatttggccgatggaaaaacaaatgaggaaacggaggattgggcatttaaaaaggtgtatggtgataaaacttggaatttcaaagaacgtttggtctatactgctaatgatcatctgaaactgacggcacgtgctggatatttttttcgtgaacgtgagaagtcacagactagtaaagaccgttatcgcgacttcagtggtggggtgaaaggaaattatgtatttgataaagataaagatctggaaatagcttattctttcgaccagtatgataagagcgattacttgccacaagatgctaatgatgtacgtgattatagtaatgtacaacattcggttcgtactttttataatcatacttttgtcggtaagcatattctcaccttgggtggtgattatatgcgtgattatttaatgtcctatcagtttgtcaataatggaagtaaacatcagtatacagtggacggttttgcacagtttgactggaacccgacgaaatatttcaatgtcatcacaggattacgttttgattattattcggattccgatattaatcatttctctcccaaattaggactgatgtataaaataggaaactgttcattgagaggttcctatgccggtggtttccgagcccctactttgaaagaaatgtatatgaattttgatatggcaagtatttttatgatttatggtaatcctgacttgaagcctgaaaccagccataatttttctctttcggcagaatatattaaaggtcgttataatttgacggtgacaggtttctataatatagttgataatcgtatcactacggcatggagtgaggcgttgaaaggacaggtatataccaatatatcaaatatcaagatatctggtgccgaggcaaatgcttccgccaaatatccttgtggactgtcggcacgtttatcttatgcttatacacatgagaatatcaagaaagggcaacctgtcatttcaagtactcgcccgcatacggctactgtccgtcttgagtatgacaagcattggaagaactatgcgtttaatattgctttgaacggacgttttctttccaaggtgaatacggaggaatatacgtcgaacacttcttatgaagaaactgagaaggtgacctatccggcgtatacaatgtggaagcttacgttgtctcaaaaagtatggaaaggtgttgatatgactttggcggtggacaacttgtttaattatgttccttcccgttattataataattcgcctgctactaaaggaacaactttttcagccggtttatcattaaatatagaacaattattcaaatgaaagttggctgctaatactaaataaactacgtgatttaaataaagatatgaagaagaaacaattactgattggaggagggatagcagtcatcttgctgcttttgtttggtgtatggaatctttggttcagtgcaactaaagtggctttcatcaactatcaggtaatcagtttagggcagatatctaaggctaatgacaactcatttattaaaatcagtgaactgagcacagatgacctgaaccgattgaccagttatgatatgatatttatcaatgccatgggattaaggattactgaagagcaacgtgcgcaaatacaaaaggcggccgatggtggtcttccgatattgactactgccgctaccaatcctgtaaacaagattatttcattggattccatccaagcggatacattgaaacattatctgtctaatggaggacgtcgtaactatcgcagtatgctgaactatgtacgtgtgtatattgataaaaaacgattctctgtgtctgaaccggaagccgtagtgaaacgtgccgatgatgtgctttatcacatgaacccaaagagtcccgaagacgaagagttgggtttcaatacggtagccggatacaatatttttctgcaaaacaacggtttgtggaaagagaatgctccgcgtattattgtgaccggtccgatgggtgaaccttccggacttattgctaaattggaggaaacaggcaatatggtttatcctatacgttccatgcattcttttattcagaaccatggaattgattctgttcgtccgtctgctatcatcaatatggcgcatggacgtatgggcgattatatcgtagattatttggcgaaacagaatataccgcttttctccccattgaatgtaaatcgcttggtagaggagtgggagagtgacaagatgggtatgaatggcggctttatgtcacaaagtattgttacccccgaaatagatggagctatccgtccgttcgctctttttggacattataaggatgaggagggtttacaacgtgcttatgctattccagaacgcttggaaacttttgtggaaacagttaataactatattactctgcagcgtaaatccaatagtgagaaacgcgtagctatttattattataagggtcctggtcagaatgcactgactgcgggtggtatggaagtggttccttcactttataacttgttgcagcgtatgaaacgcgagggctacaaggtggacggtttgcctacctctccgaaagaattggaacagatgatacaatctcaaggagccgtatttggtccgtatgccgaaggagcttttgaccggtttatggaaaccggcaagcccgaactcattacaaaagaacaatatgaaagttggataaagaaatccattcgttctgatatgtatgccgaagtagtagctgctaatggtgaatttcccggagcatatatgactacttcagacggccgtttaggagtagctcgtttgcaatttggaaatgtggtgcttttgccacagaatgcagccggtagtggggataatgcatttaaagttgtacatggaaccaatgcagctcctccacatacttatattgcttcttatctgtggacacaatttggatttaaagctgatgcgttgattcatttcggtactcatggcagtttagagttcactccgcgcaaacaagttgctttgtgtagcaatgactggtccgaccgtctggtaggtgcattacctcatttttatatttattccatcggcaatgtaggcgaagggatgattgctaagcgtcgttcgtatgcgggattgcaatcttaccttactccaccttttatggaaagtagtgtccgcgccatttatcgtgaactgactgaggctgtcaagacatacaataatttgcttccggctgatgggcaggctgtactgtctactggaaataaagaagctttgaaccgtgcttcattgatggtaaagaaactcacggtgaaactgggcatccatcgtgaattgggattggatagtcttcttactgttccttatgctgaagaagatattcagcgtatagaaaattttgctgaggagctggcaaatgagaagattacaggtcagttgtatacaatggggattccctacgaacccattcgtattacttccagtgtgtatgctatggctaccgagccgatagcctatagtctgttggcattagataaactacgtaatcgtgcggacggacaggtagagaaacatcgcactctttttactcaacgttatttggaacctgcacgtgatttggtcactcgtttattggctgatccgtcgttggtttctgacgaattgatttgtcgtattactggcattacttccgatgaacttgctaaagcacatgaaatcaataaatcccgtaatactccccaaggcatgatggccatgatgatggcattagctgaagaggctccggctgaggctaaaacacatgctgatatgagcggtggaataatgcaggctgaccaaagcgtacgttcgaaaaggaatagcatatctgagtcaatgaaagagaaaatgaaggaaatagcgaaaggtatgaatcctgagaaagctatggaacttgcaaaaagaatgggtgcaagccctgaagctttaaagaaaatggaaacaggaatgtacaagagccatgctgtaggtatgaatacactggccaaagatacggttacaatgaaaacaacttctcgaggaaaacgtgaaaaagcggatagtgataaattcggaggcatggaagcgatgatgaaagttatgatgtccaagaaaaaagaatactctaaagaggagataaattttgctttggctgtcatggaagtagaacgcactttgaagaatgtgggtaattataagagtgctcttttggaaagtccggaaagagaattgacctctatggttaatgcgttgaatggaggatatacacaaccttcaccgggtggcgatcctatcgccaatcctaatactttacctacgggacgaaatctttttgctatcaatgctgaagaaactccgtcggaatctgcatgggagaaagggaaacaattggctgacaatactatcgaaatgtatcgtcgtcgtcataatgactctattccccgtaaagtaagctatacattatggagtggagaatttatagaaaccggtggcgctactattgcacaggtattgtatatgttaggtgtagagcctattcgtgatacgttcggacgcgtgacggatcttcgtttgatcccttcggcagaattggggcgtcctcgtattgatgttgtggtgcaaactagcgggcagttgagagatattgccgcttcacgcctgttccttatcaaccgtgccgtagagatggctgccaatgctaaagaggatcaatttgaaaatcaagtggcggcaggtgttgtggaagctgaacgtgtattgatagaaaaaggtctgactccgaaagaagcccgcgaaatgtctacttttcgtgtgtttggaggagtgaatggcaattatggtacgggtatacaaagtatggtgcaatctggtgaccgttgggaaagtgaagaggaaatcgccgatgtttatttgaataatatgggtgctttttatggtagtgaaaagaattgggaaactgtccgccaatttgctttggaagctgctttgacacgtacggatgcggttattcagccacgtcaaagcaatacatggggtgcattaagcctggatcatgtgtatgagtttatgggaggtatgaatcttgctgtccgtaatgtgaccggtaaagatcccgatgcgtatctgagcgactatcgtaatcgtaacaatgcccgtatgcaagaggtgaaagaagctattggcatagagagtcgtaccacaatattcaatcctgcttatattaaggaaaaaatgaaaggggaggccggcgcagctaatacttttgctgagattgtgcaaaatacgtatggctggaatgtcatgaaacctcaggctgttgataaggaaatgtggaatgagatatatgatgtgtatgtaaaggataaatttaacttgggagtgcagggttattttgaaaagcagaaccctgctgctttggaagaaatgactgcggtaatgatggaaactatccgtaaaggaatgtggcaggctagcgagcaacagatagcggatattgccaaactacataccgatttggtgaataaatataaaccgtcttgttcaggttttgtttgtgataatgcaaaattacgtcagttcatagcttctaaaatggatgcacagactgcatcccggtataaggaaaacatcagtcagatacgtgaagttgctgcttcaaaagagcaaaagggtatggtgatgaaaaaagaagagatgaatacagtcggtacggaacaacagacgaatacggtaagcaatactgttgtttgtgttgtagtggtggctgctgttcttgttttaattgtattggtgcgttgtcgccgtaaaaaaatgcaggaataacaggctatggaaacaattgtagttgttcttatgatattggtctgtttcaattttatgatgaaacagacattccgcaaacgaggatcggttgcagcaatagctgttgtagccgccctttttgtggggctgatgtgcccatatgcaattcagcagtctaagacacagattgctgattggctggcagatgtccaattgatgcttgacacttcggtggtgcttacagtggaagttgccttacagatggctttttgtatgttggctgttcatgtgcttactacaggtcctgttaagaaacgtactctttgggcttaccgtgctttatgttggtttccgggtattttgatatttcctgtcttgtttagcggattggtatatcttatcttctcttttccgggtgtttccttttctcttgtcgcatggagtatggcggtaggtgtattgatattaatttctgtaggcacattgtttcttcgttatctcttgccggaaaaggaattacggttggaactattgttcctcactaatgcattgaccgccatattgggaattattgctactgtaaatggtcgtaccgccgtaacaggtataagcgaggtggattggggggcattgaccggcttgataattatgctggcaggtggaggactcattggattggttatatataaatatagacgaataaaaacaaacatttaaaacttactgacattatgaatcttatatcagacattctgttttggatttcgaacggacttttagttcctgttgttgtattgcttattgttcttttcatccgttcgctattattgataggcagttttttcgggcaatatttggctattcggcgtacagatgcgttgttgcgtcaacagcttgatgcactgactatagatactttgcccgaattggaaagcaaacttccagtgaagtcgaactcgttggtcattgtgtatatccgtcgggtgttggggtcaaaagaccgtccggcacatgtgcagcgtctgttggctgattttgaaattactgctgataaggatttggctatttcaaaaacattgactaagatgggaccgatgcttggattgatgggtacattgattccaatgggacctgctttggtgggactttctactggtgatatcgcttctatggcatacaatatgcaagtcgcttttgctacaactgtagttggtctgttttctagtgccatcggtttcataactcaacaggtgaagcaacgctggtatttgcaggatatgactaatctggaattcctttctgaattgctcactgaaaaacatacagcttgagatgaaacgtaatttattaagaaaagaggaggatagtgacccgatgagcgtggtcagcaatctgtttgatgtggcgatggtgtttgcggtagcgttaatggtagccttggttacccgttataatatgactgaaatgtttagtcaggaggattttacgatggtgaagaatccgggtaaggaaaacatggaaattataaccaaggaagggcagaagataaaccgctatacaccttctgaggatcaggatgccaaaagcggaaagaagggtagaaaggtggggattgcatacgaattggataatggggaaattatttatgtgcccgaagattgattggggagttatggttgattgattttttcttcttcaatcgaagaggtgtaggctgtatttcatattcagtattacgcctctttttattttgaatatttactgattacaagtagcggtctgtccgtttagttacgcatttcgaaacaactctcctttgatatttgttattattacaaataactcactcatataagaactataatgatgcaaaatgaactaaacacgagcttgattgaagctgtaaaagaaaaactgccacttaaagaaaatctggccaatctgttaatagatactttgtatatcggtaaagaggctatttatcggaggttgcgtggtgaggtcccttttacattagaggaagctgctttgatatcaagaaagttaggtgtttcattagataatgtaataggagtctgtttcagttccaatgccgtattcgatttgaatgtggtggatcatgaagatccgtttgaaacttactattcattattaaaaaagtatgtcaatgtgttacatgctttgcaaaacgatccttcctcttccatgggtacttcttccaatattatcccccaaacactttctttgaaacataaatcattgtctaagtttcgcctctttaaatggatgtatcaaaacaagcatattcagtgcaagcattttgacaaggtggaagttcctcaaaaaatatatgatattcaaaatgattttgtatctgctaccggacatatacattctgtggattatatctgggatagtatgatttttcatcatctgataaatgacatacagtattttgccgggattcatcttatcacagaagaggacaaacatcagattaaagaagaactattgcaactgaccgacgaattggaagacttggcttctaagggaaagacagaagcaggtaacagtgtacatatttacgtgtctcatattaattttgaagccacctacagctatctggaggctgattcggtacaactcagtttgatacgggtgtattctatcaactccattactacgcaggattgtggaatgttcctcagtttgaaagaatggatacagtcactgaagaaattctcgactatgatttcagagagtggagagatgcagcgtatacagtttttccaacaacaacgtgaaataataagcactttataatagtttcctatttacgaaaaacgaaataggaaagaaattctgtttactgaaaatgaaagtaaataatctgtttatttactttttttcgttatctgttttcttattcctcaattggtcgtgaatcagaaagatagaaagtctttcatctctgttttagagcatagaattcccatttccataacttaaatttgcagtctgtttgttaataaccaaagaaggggaaaagaatgaagaataagattgtgaatgaactgattacagccatgaaggcacgtgttcctgaaaagcagaatttggcaggctatctggcagatacattatgtatgggaaaggaagccgtttaccgcaggctacggggagaggtttcttttacccttgaagaagttgccttgatctctcgaagactgggtatttccattgatcagattataggaaatcacctttcggacagagtgacctttgatttgaatttattgaagtcttctgattcaatggaaggctattatgagataatccatcgttatctgcaaatttttgattatgtgaaaaaggatgaaacaacagaagtttatactgcttccaatttgctgccgtttactctttattctgaatatgagtatctgtctaaatttcgtctttgccgttggatttatcagaatggtgagatcaagactcctaattctttaagagatatgcaggtggaagaccggattgtgagtgcacataagaaactatgtgaaagcgtgaagaaatgccggaaaacgcattttatatgggacacgaacatcttttattcttttgtaaaggagataaaatactttgccgttcttaaactgataaccgatgatgatgtattgcatttgaaaaccgagctgtatcagttgcttgccatgatggaggaactttcggtaacgggagaattcagtgaaggcggaaaagtttgtttttatctttctaatattcattttgaggctacctatagctatatagaaaaacgggattttcaaataagtttattgcgggtgtattccatcaattcaatggattcacaaagttttcatatctgccggatgcaatgtaactggatccaatcattaaagcgtcattctatcttgatttcagagagtggcgagatgcagcgcatagattttttacaaaaacaacaagctattatcgatagtttgtaaagagtgccatttgccacgaattacgaatatcgcaacttttttatccggatagtgcgtacaatgcaaaaatctatttggatggagcttgttttttatattttgcaacagccgcttgcactcattgcataataagttgtcagtcagttggattattgtctgtttcagaaatgaatataattcacagcctcactctatttcccgatatttgcagtataagaattagatgagtattcatgttagatggaaggggataatgaatgatgaaaagagataataaaacctatagaaactggctctgcttactgtggctggctgtctttacttcttgtatggatgaaactttcaccgctagcgatgtggaaggtacatttatatctattaggggaatggcacctcatacgggtagtgtgcattctgggactccggaagattatatcattcatacgctccgtgttttggcatttgacaaaacgacgggtgataaagtaaccaacctattttataatgcacattccggtgatattattcgtcatcccattgatgcaggaagttacgattttgtgtttttggccaatgagccggcttatcaaccggtccggactttattggatgctatcactcattatggtgatttgaatcatatagcctatcccgctgattttttctcatcagaacaaattattccaatgatgcaggaaataaagaatgtgaccgtgttatccggcggacagggagcgacattggaagataatacaacagtatctatattgcaattggctcttgaaagaatgggggtacgggtagatgtcatattgagggctgaagatgatttggaccaggcatttaaaggaataatgttcagtaatttgccgaatcttgttccgctgacagccacttatgatggtccggctattgaacggagtgtgatacgtacatttactgtggttgatgacggaagttatttcacccaaggtaccccgacagccgaatgggattgggagaaaaaggtgaaccgtatcatcctgcctgccaatgaccctctttccgttactaatgaaagtgaggctgtaaactttacaatagatatgggggataattataatccgtcttgcaaattgaagattgcttcgaatccggtaaattatagtttacccaagaatacaaaattggatttgaccggatatattaaggagccgttgatggtgaacatagaggcgtctgaatgggagaatgtggatgaagattggaatatatcaggtattaaggtactgaatgtatcggacttggaggtcagtattactgattttaatggagcacgtatttcctttacctctaatatgccggtagtcaaagtgatgcctcaactttatgtgggagccgggggattagcagcagaaacagaaaaggtattcaatgatttggtgttgctaaatggagatgtgaaagacagtggaaccacgataacctatactacctctcgtttctcatatatctatgataaggcatctcaaaccggaacgggctatatggatgtgttgttggatgagcaaaacataatgggtacacaggaaacttatcggatttttttgtctgctgaagatgaagacggaggtagcctgcaaagagagataaaagttcatgccagtcaacacgggaaacgttttgaatttaatccgtatggaaccggctatataggcgctttttttagaaatgatgaacagggtgaaagaattattaccggacagcagaaaaggagggacggaacaaatgaacgtcctcaggatttaggtacactcggtctatggaaagcggaagtggaagaagggaatttcattgttctgagctctactccaagctttgatccgaatgtcgggactgataatccgggagtcgcagagcattataaggtgcttcctaataagtataagggagaaaatggaacttatgtggaaggtaggggacgtatctatttccgtatgggagtaacgggaaaaaatgccggaacgactcctaggtatgctaaagtgaaaattcaatggtatggaggaagatatgggacaggagatgatgaattgtggtataataccgagtatatgtatatccggcagggagaagcggatgattacatcatgaggcctggaactgtagatgccatatccaagggaccgtcacaggggaaagcacgtgattatgctcgcaaaatatcgcctttcaatctgacggctcctgcttatctgaatggtggaaatgaaccctatgcaaaagttgatgtgaaacaaggaaggtttgtgaaatatcccactcaggcaggagcattttttcaatgggggcttccgaaggatgctgatcaggactatttccgtttggcttaccatcctacagcctatactgtgaaccattggattaaggatatacagttttttaatagtacatccgaattgtttttaccggtatggggaacagcgcctataccagcagaagatatttatgactatgggtataaggaaatatttgaaacttgtcctgacggataccatcgtccttctgacggatatattgacagaatagcttataacggaccatatcctaataatatagatcaggatggcgatcatgtcattgtgaaggcaaatacgaacaaggatgtcataaagacagtacttacggattatagcgttgaaatagcattttctgaattgcggcaatccttatttaaaaacccactgagtggagatgctggattaaatgagaatattggcggatatgacggttcgccggaagtaggagggattaaagtagaccgatatcagaacttttggcaaagtaggactgatgtggatgaagcgcaagagcatataaccttcttgataggcttctatgctgatggcttttttgaccgcagacctattaagatggggtcagctgacggtagttatccttattgtgtatcatcgggtaacgcacaggcagcttatttgggaattttagtatataatgaggcgaataatgcttctgtcttttttccgtcagcaggaagacgccagaataaggatagtagtctggaatttacaggacagaccggctattaccataccgcttctatagctgcgtcttctgccgaagatcctcatgctgtgtggagcatgtctctgggtaagtggccgaatcccggtttgatgtatcagttgccgacctttggtcagtctatccgttgcgtcagggatgaagtaattagtagaaagtgatgatatgtatttaatgaaatgagaaaatgaaagaatttgtattatatatagtttgtctttggtgtctggcttttctaatgtcaggctgtgaagattctatccacctatcggagcggcctgataataataagcctcaagcagataaggtgcagattgaaatctttgcccgtgcgaattcatatcattatcctacagtccgtaccatggatgatgaagatagggtagggaagactccatggatattggtattcaatggagaaaatgcaaatgccacctttgtagaggcggtacaggcttttgagatggtgggaaaaaggtatgtcatattgaccaaacagtccggcaatagcaagtatcagttactgatattggcgaatccattgaatgataagttttattatggaaataatgtgactgaatatttatttacagaatcggatctacggatgaatatgataccggggataacgacattgtccgaagtttgtgccaaaatcctgactgaaccgttagaaagccctgcaacctctgtcattccttttagtaatgacggaaagactattcctatgagttatttgcttggagtagacaaaatagatactacaacacggattgaaaatagtgatgggagtactatagagctcattcgtgtagcagcaaaagtggtggtagctaataaagccgataacttttatttgaaaggaattacagcagtagtcaatgtacctcgacaagggcgattgcataatcaggatggtacagttatgaataatatggcaaacttgacggaatattgtcagactggttatggttcttctttggtagtgacggataattcggcggtgggacaaagtacggaaatgaaaccgttatatttgtatgagtccgatattcagaacaatacctacttgattgtagaaggaacttatgaaaataaagactatttctataagttggtgctggttgacggaaaatataatctcatggatattttacgcaatcattcatacacatttaccattattaaagctaaggggcccggttatgatacggtagaggatgccaaggcatccaaagcttccaatgttgatttggattataagttatcagttgatgatagttactcttatgaaatgatatccaacaatgatttttatttgggggtaagtaattcagtatttatagcttatgccagtgaagataaaatttatgaagtaactagtgtggctactaattgtaaaacgaactttcctaattcatgtcgtattggtgataatcatatagaagtggatgatgctttttcactgactaacccggctgatggggcaagaatacctatagtggaagggagtacacctgaccctaatattactcaggtagaatccttaatcacttccaaattgaggctgcatgaagattatcagacggatgagggaggaatttataggaagaacgcatacatcaccttgaaattaggcaatttggagaaaaagattcgcgtcaggcaaagacttgctgtaccccaagaagggctgattttgaaatatatgcctactactgaagatgtggatagttatgatatgaatttttattgtctgactgcttatgtggaggatggggccgataatcccaagacttggataaaactacgtccttcatcaagcgatggacggaatataacagatcggataacagtagatgatgggaaaatttatatggaggtaacagctaatgaagggacggcatcccgaaacggcttggtgtatctgaccactataaaagctcctgataattcttccggtatccgtaccacacaacgtgttaagattaatatcactcagaaaggtaaaacgattgtctcaaattaaaagtaatgtagatgaaaaagaaaatactattcattctctttatatcgggttgttttctgaccggaagtaatgcacagagtattgcagtgaagagcaatctgctctatgatgccacttcaactctaaatatgggagtggaattgggattgtcacgtcagtggactttggatgtccccctcaactataatccttggaaaccgggtaatggcaggcgtttgcgtcattggggaatacaaccggaagcccgttattggttttgtgagcgtttcaatcgcacgtttgtgggtttgcacggtcattatgccgatttcaatgtaggaggatttcctgattggggattcatcagtaagaatatgcaagacaatcgttatcagggatacctgtatggcggaggcatttcaataggacattcatggattttgaagaaacgttggagtttggaggcgtctttgggaataggatatgcgcatattgtatatgataagtatccttgtgcggaatgtggcactaaactgaaatcaggcagaagaaactattttggtcctacaaaggcaagtatatcacttatttatataatcaaataattgaaccataatgaaaagaaatagatatatcatagcatatgtactgcttgctttttgctttatcaagcatccggttgtaggacagaaccgctcttttacaggtactgtcactatacatcccgtacgcttggaacaggtgggtgattcactctatatagaaatggatatggtgttggaggatgtaaagatgaacacatctcgtggcgctgattggattcctcaattggtttctgcatcatgtactcttaatttaccgcgtatttcattgaaaggaagagatgaatacaaagcttatgaacgatatctgactcttatgactaaccgggaaaaagcaagttatgacttcccctatattgtgaaaaagatagttggaaggaaaaatgcgatgatttcttatcaatatcacttgccttacgaggcatggatggcagatgcctgtctgaatatacggcgtgacgagtgcggttgcggtgaaactgcctggatggaaatagaacctttgatggaaaaagtaacattggagtatcctctgattccctatgtgataactcctcatctggcctatatcaggcctgttgtagaacaggtaaaacagagagatgtacaggcggaatgttttttagattttgaagtgaataaagtggatatccgtcctgaatatatgaataatccgcaggaactggccaagcttcgtgcgatgattgacgaactgaaagcagacgctgatattcaagtgaaaagtttggatattatcggttatgcctcaccggaaggttcgttggcaaataataaacggttgtctgaaggacgcgctttggcgcttcgtgattatttggcaggcttatatgactttccccgttcccaatacaatatcttgtttggtggagaaaattgggcaggcttggtaaaaacactccaacatacaaatattgattaccgaaaagagttattgaacatgattacaaacaacccctatgaccaaaccttaaaattgaagttgcgagaatttcgtggaggtatcccctatcaatatttgttgaggagtgtttatcctaaactccgtgtcgccatatgtaaggtaaactatgaagtgaagaatttcaaagttgatgaggctagggaagtgtttaagaagcgtccgcagaatttaagtttggatgaaatgtttttggtggccaatagttatccggaaaattcacttgaatttctggaggtttttgagactgctgcccgtatgtatccggaagatgaagtggcgggtatcaatgctgctgttgcatccctttcacgtaatgatctggtttcagcggaaagatatctgaaaagggtgaatttaaaaagaaaccagccggtatatgataatgcgatgggagtctggatgttgctgaaaggagatgatgaatcagctgaaaagtatttcaaaaatgctgctgattccggacttgatgccgccaaaaagaatttgttggaattagcggaaaagaagtcggatgttattaaaatggaacagagaagagataaataatttagttagaaacactttaataaattgtaaaacaatgagaaagaaaaacgtattaatgtcagcaattgcggctttagcatttgcggcatgtagcagtgatgatgtactcctggaacaagataccgggattgtaacgaatccaacaggaaatgcatgggtggcattggatataaagacaccttctgtatcaagatctcgtgcattgcatgatcctaataaggaggacggtactgctgaggagtcatcggtttctactgtcagagctattttttttgatgcaagtgagcaactgacggatgatattgagttgacaggtgtcgaagccggtaatccaggacagcctaacggaggggtaagtaagcctttcaaagtggatgcaaaatcaaagcgtatcttgataatagcaaatcccggagcaggtttcccggctaaaggctcttttggaacaggggcttcttatagtacggtcaatggtgttcttgccttgtcgttaggagcggatgtgacacaaaatgtagcgaagaatggcagctttatgatgtcgaatgcaaaaggaaggctggaaccttcagtttcaacaacagatggaaccgatgctgaccttgcattgtataaaactgaagaattggctaagaacagtccgttggctattcacattgaccgtgtcgtagccaaggtgcgtgtatatgtaaagcaggagagtgatgtggctactattgcaaatcccaaatggattttgaatattacgaatacaaagttttttcctgtatccgaaagaatattgacttggaatgaggatccggccaacggtggacgtggaacttgtattactccttttgatcaatataagattggttcgtatagaaaagaccctaattatgataatcagaatggaggtctggattatatggtaattagtaatgatgtggcaattgtcaatgatccgggagaaagccagtattgtcttgaaaatactcagaccagtattcataatcttcatcaatatactacgcaagtattattgaaagtggaatttttgccgaaagcatttaaaaagcctcatacaacagatttaggaacacctgatccgaataaggattttatgagaattaatggtggcttttatacttttgatacattgaaagaatggattgaagctgaattgagaagtaaatatgacgccatcggtactagtaaaccttctgttactactacattgacagatgctttgaatgtgtatttggatagtaaaggaataggtaaagtatctcttctggattccggtgttaatgtagatgctttggtaatcacattcaatggtaaaattgatgaaataaaaggaaaaggtgcaggggcagtggaaaatttcaattattatgccgatggtatcagttattataaaatcatgattaaacatgatgatacggataaggccttgaatgaactcggtgaatttggggtggtgagaaattccgtttatgatatcaatgttaataagttcaataatccgggatatccggaaatacctacgcccggtactgatcccgatgaggaggacggctcttttctggcgatccagattaatgtcaatccatggacttggtacactcaggaagaagaattttaagaagcggattataaactttaactccctctttttaagataagggcggcttggaattgaagatactgggaactatatatcccattactgtacggaagacgattgttaatgagatgtgtagactgagtggattcctgtaggggtgcattgaatgtgcctgaatacgtatagcaaaccgttcccgggcagagtcaatctactcctgcaggaaataatacataagcaaatcatttaaactgatgaatatgaaactaaaaagccttagaacttccgctactttgatagtcctgttggctgtctctttattgacgttctcatgcaatagctttgacgaaaggttgccggaatgtagattgttggtaaagttcaaatatgattataatatgcttcatacagatgctttccatacacaggtagacagagtggaattgtacatctttgataaggatggaaggtatttgttcagtcaggttgaggaaggagaggttttggctacaggatactatactatggaggtaaaacttccggtaggcgaataccagttgctggcttgggcaggggcacatgattcctatgagataactattcctaacggtggaacaacccttacagaaatgaaactccagttgatgcgtgaggagtctcttgtcattaataaagagttggaaccactgtggtatggcggtatcaatcatgtgaagttcacaggtactgcaaatcagatggaggtaatcaatttgataaaggatactaataagatacgttttatattccaaggctcttcctcgggggaatcccgcagtaccgatactagcggatggaccatcaatatgcatgactatgattatgagattatagaatccaatggatatttaggacatgataattccttgctggacgatgatgtgctgagttttcaaccttattttatggaacagaagaatccgtcggctgtggcggtcgaattgaacactatgcggttgatggaggacaggcctgcacggtttgttgtgacggagaaagcaaccgggaagaaagtctttgatattaatctgacggattttcttattttgacaagtatggaagggaataagatgaaacctcaggaatatttagatcgtgaggatgaatataaaatcatattctttttttctgactcaactgcatggaatgctgttcagattaacattaatggatggacgtggtatattcagaatgaggaagattaaaacagaatcaagaatggtttacgaatagggaccttagaagcaatatgataaatgattgcttctaaggtccctattcttttttcaatatttattctagtatcggttgataacctcttttgccttgtttacggcagtggtaggagaaatcttatccataccggattcatcaaacattttcagggctttgtctatattcttgatagcccctttattgcctttcctttcaaattcttctttcaggatgcgtattttttcaaatgcttgtactccttctgtcaggcgttctaaccggatagatgaacgggcgcccggataaatcatataagtgtccccggcagcccaagcggtaaagcggctgtcctgcagaggatttttcacccaactgtttaaagcccaacggagatacccatccagattttctttagcactgtgccatgccagccattcagcttcggcaggttcactgaaagtaaaagtgttgggacggggttccgtgcaacaggtataataagtggtcactttgcctgctttccggcgtgcttcaatctcttccggtgtgaacttctcggcgatagtgatacaataatcattcagctcatccaataactctttgtgatacgttccagccaatgacactttaaagtctttatcagccttacggattactttcagtgtttcctgcatgtccttcatcggtctttcgtccatcgcaatgtgagtgatatcgaaccagccttttgctttcagatgctttgcgaaatcttgcaacatatttatccagaattcttcataagcggcttcgcccggtttggcttccaagaacttgaaagagttactggcttgatcaaaatattggaaagaaagacgccagggaaccatcgagtaacaacttatttgcttcttgactccaaggtctatcataaattccacccatttatcgaacacggtatagtcaaagtaccatgttccatccgcttttttcagccaagtaaccatgctctcaaaagcgtcgtatgtctgtccgttccaaggtttgtgcataatggaggctgtaattactttaccgcctgcatcagcatataatttcattaatgggcgcatcaagtcgaaatgttccttgctgaatggttccacattgtagtaacgggatactgcgtatggattttgccataaatccaaatggaaagcccattcggaaggaggaggcagcgtacgttttttcacttggacattcagtttcaattcggccagtgtactattgttggcctttactgtaactgttcctgtgtatttcccggctttagtctgctggggtacgttgatacggatccatcccccttgggtggagttggcgggaagagtcagagcgggagtgatgtggtctattacatctgctactaaagttgaatcaaagtcggcgctattgcggtagccacatgcgcccaaaccgtctttgttcagttcatcagtcatgacatagcgtacaaagccggtacggatatcatctttgctgatggtattttcaccagagattagatcactgactgtgagagtcaaatcattcagtgtcttaggagtccatactaccatttgggccgaaaccttttcacctttccatgcagtaaggtttatacttttctgtgtactacggataggggctggttcctctttcttatagcggatgtctgtgcttccccagctgatttgtggggctgtaactttcgcccataaagtggggttggtggcaataggattggctgcttcctgataatattcggaagtttgggcgttcatacatactgttgacaacaggagagcgcctagaaataggagttttttcataggttatataatagttagttgaagttacaaaggtaactcagggagagttaatttccaaataggagtgatgtagtttgcataattcctgaggaatatttatttttggcaagttataatataaaggaaaatagagatgaaaagaattgtaaatgtgctttttgcgggtgtactggctatgactgtactctcatgtagtgaagagaaaaaaggatatactctgaatggggaaatatcagatgtaaagaatggaatggtgtatctgaagaagtatcaggataaatctttcatagatgtggattcggctgtaattacggatggtgttttcaaatttgaaggtgcttgtactgagccgttggcatacgggttgactacgttcaaggatagcaaacgtccgttggtattctttttagataacgaagagatgcagttgaagatgaatgaatcggaaaaggtattgactgtgacaggttctgctttgaatgatttgtatgcacagaatgctcctttgactcgtcaggatggatatagcatagatagtttggtatctgctcatcctgcatcggccgttactccttattttgttgtgaaagatttcgcttataagttgaatctggaggaaatgaaggcattacgtgccaaattagatgcctcattggatggaaccatgtacgtcaatcagatagatgattttatcaagcggatggaaaatattcaagtgggagctgtagctccggattttacattgcccgatgtagatggtaatcccgtcaccttatccggtttgagaggaaaatatgtattgattgatttttgggcttcttggtgtcctgattgccgcaaggaaaatccgaatattgttgctgcctggaataaattcaaggataagaattttactattttaggagtttctctggatcgtaagaaagaaccttggttggctgctatcgagaaagatcaattgacatggactcatgtttcagatttgaaggactggaagtcggatgcagccgtgcagtatgctattcgttggattcctatgaattttttgttggaccccaatggagtgattttggcggtaggattggaaggcgaggccttgcaacaaaagttggaagaagtcttgaaataagtttcccatcataggttgcacagattagaattttgatttaaatctgtgtaacctgtagtgaaaaaatagttgtttttatgaagttttcgatgctattttttttcgaaagtatccgtaataagcgttagtgccccatctccggtaatattacaagctgttccaaaactgtcctgcaatgcaaaaatcgtaagtagtagtgcagttccggcttcatcaaagtgaaggacagagatgatgagccctaaagaggcaagtactgttccacccggtactcccggtgcaccaatggcgaataatcctaataacaggatgaataaagtaatttgcaatatgctgggcatgcttccataaagcatttgtgataccgtgagtacaaatacggtttctgtcaggatagagccgcacaaatgtatattcgcgaataaaggtattgttacgtcgctgatctcttttctcagtatcgggcttttacgggcacattccaatgctatacccaatgtggctgccgaagacatcgtacctaatgccgtgaggtaggcaggaccgtagtatctcagtacttgatagctattctttctggaataaaccgccgcaatgaaatagagtagtgtcagccagatgaaatggcaaacaataacaactatcagaatggagaggaatacaggtaattgtttcgtaacagctccctgatagctgagaatgcagaaattggcggcaataaacacaggaagtataggaagcaacacccttttcaccaattcaagtaccattttttggaaagtgtccaacaactttgatatttcgtccgattttacccaagcagtggcaagccctatcaatgcggccagtaccagtgcagtcattacgttcatgactggtggaatatctatcttcagcagattctccggtaatgctttcagtgagttggcatcatcggctatatgcaggaaaggaattacattgtatcctacggcagccccgaagaaagaagccccgatggaggagagataagcaatgccaaaagcaaataaaagcatctttgacgcattactacgcaagtgtgcgatggagggagcgatgaatcctaaaatgataagaggaactaaaaagaaaatgatttgtcccgtaatgtgttttatgcaaacgatggcttccaacacagcgtcgtttacgacgaaacctgccgacagtccgataattacggcaataagcagttgcacgatggtgttacttagaaactttttcatatattttttcagttaaacgatgaatatccggaaaaagtttgctgtatgtgtatgttatttcatagcttggacaaagataggaaaataatatagaatgtcatctgaaaaatagaaaaagacgggaaacatcgcgctccccgtcttgcaaagtcttttcgccttatgctaataccttaaattaagcgaaacatttagactctctcttataagtgatagttgttattgaaatatgaattaaaagttgtttttacctgtatcccaccatagacgtgtaccgccgttgtctgcaccgccaagagccgtacaaaggttcttatattgttccggatctttcttggcatcatcctgtgagaaggggaggcgacgaatcatgatgtccgtatcaattgtaccgttgctattgttggtttggactttgaataatttcggatatccggtacggcgttgttcggtccatgcttccataccttccggccaacaggcaatccatttttgagtgataattttttcaagttgctcttcttgattggctgcatcgtcaaaatcgggagtagtggttatcaatgctttcatatcttttccgggacctgctgcatgattaatgtaatccgtcggtttgcctttgcttgccagatagaggcttgcatctccggcgccccattggtcgaatgaagcttgaacaccggtttcgtaacattgctttgcactttcgcttttcggattgatacctcgtaaagatgcttcggcacgtaggagccaaacttccgctgctgtcagaagaacggcgggtgtggatgcggcgattgttttagtattgataaaagaataactttgatagtaattgggatcaccatccttggcatatactccttgaggcactcctaaatattcctctgtgtggtctgccaatgtcgccggactgtaatatatactgatgcgtggatcttcataaccgtttaaaacagaagccattgttgctcccatgtaggtctcgccccagccggcgacacctgctagtgggttttgatatcctttaccggagatttggatgttctctgcggatgattcaataacaccataagagtttcccaatgcttttttggcctcgctggcggcaagtgccttatttacattagatacacgcatggccaaacgaaggcgcaatgaatttgcaaatttaatccacctgctggcagtcgggcaattggacatattgatactttttactccatcttctttacctccttctttcagataagcatccaatgcctctacggctttatccaggtcattgaaaaaagctttataggcttcttcctgagtgtcaacggaatttgcttcattctttccgaatttagaatagacaatggggccataagtatcagcaatgcgatgcatggcttctactttcagaataagggtggcaccataaaaatgcttgtacttggcttcatcttgtgtaatcaacgtcgatttatgggctaccgggaaaatgtaattataggtatagttccatgcactggccgtccatcctgcctctaatgcgtataccgtatttttatcgcagaatttagaagcaaaatcatggaaatatcctgcgaacatatcatgattcaggttttggaatgtttgccagggccaagtggttccttctccccagtcgtagttaaaataaatacctttttgaatggtctcaaaattagtggtgtatttctggaaatcatattcttttacgatatcatcaaaactaccgttgattttattatcagattcgaatccgtctgtgcatgaggcaagactcaggaggccgcccatgcataaaattgaaatatattttgaacttttcataatgtctttgtttttaaggttagaatgtgaacttaacgttgaaaccgatgttacgtgtagtcggcatgccgaacacatcaacgccctgcagagtattacctactgacaaagttgcatccggatcaaatggagcatctttgtacaagaagaataaattgcgtgcaaccaatgtaagatccagtcctttgataaatttggttttggagagaatggatgccgggaatgaataacctagtgttaattcacgcaagcgtacattcgttgcatcgtacatgtagtattctgaaataccgttacggcctccgacagtaccatagaaattaggaatgtctttgaattggataccttcatattccacatacccacggtcgcgtgcctctccggattctttgctgacgcccattgcatccaggtgtgcttgagtcaatgacataacatcacctccgatgcgtgcgtcaatcaagaaatataaagtaaatcctttgtaagtaaaggtattgctccatcctaataaagcatcggggttggcgttgcccaataaagtgttgtttcctgttactttaatcggatttcctgcctcatttactttgatcttgccattttcatctctttcaaatccattaccatagatatcgcccagttttccaccttcttttacccacatatcgtatgccatggagaacccttccgaaccataacggaatgatttataatccttgtgtaaggaaacaatcttatttctgttcatggacatatttacagcagttttccaacggaaattttcattcattaaaggagtaccctctacggttaattcaataccggtattgcgaattttacctgcattgatataacggaatgcataaagtgaacctgccggattggctactttcagcaactgatttttagtatcagtacgataccatgtaaagtcaataccgaagcgattattgaagaatttccattctgtaccgaattcaatggaagtactgatttccggtttcaaatcaccacgttgctcaatgtcattggtctggatacttccaccacattgaataatatccgctaagtttgtaattccgataggaaggtcattaccaacctgtgcgaatgaaccacggaattttgagaaattgatccattccggcagtttgacactgttgctcataatccaagtcaaacctactgacggataaaagaatccatttttcatactttctgtattcgctaaagtggaagaccagtcattacgtgctgtaacatccagataaagagcatctttccaacctacttgcgctgtgccgaacaaggattgtatagtacgtttcgcatcaatcgtctggttgataaatccctttgaagagaagatgatattggaaacggtaaatacattagggcgatataaagaagctgttttggagtcaatcatcaaagaattggctttgctcacattgatgctggttcccaatgctgcgttgatagaaaagtcacccaatgttttgttaaacatggccatgaagtcaccatatacttggaaattttgttcatccgaccatacataacgtccgttgggaagccctgtctcatcattcttgccggcaatatttgcagctgttgaagcatacatcttgttgtcaaatttatcacttacgtagtctacattgccacgtgcctggaaacttaaccaatcagtagcttttaaatttgcactgatagaagccaatgcgcgataacgtttactcttgttggtcacacggtttttaatccagtacggattctgatcccactcactgaatgagccgtcttcattctttgtgtaccaattctgtaaattcatattacgatccgtgtcgaatacttcaaaattttcagcatacggagccaaatcggcgccacgggggaaagaatacagaccaactagcggattcagataataaccgcctccggcaggagtgttccggatagtctgtgtcatcaaactggcatttccatccaatttcaagcgatcgttgaaaaaactggctgtttcacggaaagtgatattatgcttttgaagtttgtttgagtcaacgatacctgtacctcgggtattagcataagagaagtaggtttgcatcttgtcattgcctgtttggaaagttaaagagttgatagcagtgatcccgtttccgaaccaattgtccacattgtcatagtctgtcaggttccctttgctaccccagctgctggtaccatcggcagtttgtccataattgttttggaattggggcaggctgatagcatggtctactgtcaggttggaagaaaatgtaattcttgacataccggcttttccggattttgttgtaattaaaatgacaccattagctgcttgtgagccgtaaagagctgctgcggatgcacctttcaatatgctcatactttcaatgtcgtcagggttcagattggaaataccgtcaccagagtcatggttgacaccgtcattttcacctcccataacggtggctgttgattctgttgtgatattcagcatgggaacaccatcaatgacatacaacggttggttgttaccactggcgaatgctgaacgcgcaccacggatagatacttttgccgaacctccaagaccggatgaactctttgtaatctgtacaccggcggatttaccggctagtgaattaatcatattcgcatcctttaccttattcagctcgtcaccattcaattgctgtgtagaataagtcaaagaagcttctttctttttaatacccatagcggttactacaacagtttccaatttcagggcgtcgtcttccatcttgatggtaaagttggtttttccgtttacgggaataatgacttttttatatccgatgtaggaaacggctagttgtgcatcagtgggaacttccagggtaaagttgccgtcaatatctgtaatagtaccgttagtagtaccttgttgaagtatgtttgcaccgataatggcttcaccctgcatatccgttacaacaccttttacagtgatcgtattctgctgcttcacttcttcacgggctatgttgctttctttagtcagaacaatattctttccttccattacataagagattcctgttctggcaaaaacttcatccagaatttcggatacggctttgttacgggctttaacagttactttgcggttaaggtccacattctttttattatagacaaacagataattggtctgtgtttcaatggtcgagattaattgagctaccttcatggtgtgggtatcaaaactaacttttgcattttgagagtgtacatttacgctaaatgcgctgaatgtagtagccaaaagaagaaataaggtaatcttcatagttcgtaatatttgtttaaagcctaaactttttgggcataaatacccttccaaagaaatttttctcatatctttgtaatgtgttaagttaataaatttgattaaggtcaattgttagctgtcgaatcggggagtatgggggtactttccgattcttttttcaaaggttcttatgtaatcataatggttaatttttaaggttaaacttctattgtgattttattctatagttatcttgttatgttcgttatcaatatcgtatttgaacggatggtctttttgtataacttttagtatatgctctatgccatccaaatctttgaatttaccggtacaacggtagttctctaagattttaggattcttcactgttatcttataattataatatagagcaatcttgtccagtaattctttaaacggaacatcatcgaaataataaatgccttgcatccatgctaaagcattgttgctgctcatttcgcccgttctatatttgccgttttccatcgagaaatactttcctttcgtcaggctggtaattgttttttcttcttttgcactgttggtaagcaaattgatggaaccttctatcagtctggctataaagctgtttgaacctttataagaacatacatcgaattttgttccggtgacttgtacctttatgttttctgtctgcacataaaaaggaatttccttattgtgtgccacctcgaaataggcttctccgtctaatgtgactttacggtcttttttaccgaaatcttcatcataagtcaatgtagtttgggagttcaaccatactaccgaaccatcggggaggtccatctgcgcacgttgccccgccggaatacggatggtttgtgacaattgctgcttgggtttgtgcatatgtggcaaatccatgacaaaaacaatagccaacatggcggcaatggcaatcagcggatacagatacagatgtcctttcggcttccgctgtatcttcgaatcatcggaaaaaagggtaatatcaaacaacattcgttctttcaaaaagcgttccttgttctcggcactgctttccgtccattccacaatttggctttcctctttttccgtggtttctcctctgaaatatttgtgtagcaattctgtcttcattctttccgcattttgtatatagaacaggatagtgggaaacaaccctagcggaaaaatgattttttttcgattttctcaaaaaaagtggtttttaccctcttttttcatttcagataaaattattaccgccctgacacactgctaataaaaaatattagtaactttgcaacacccaaaataagcgagattgtatttatacactataaacaaaaataagagattatgatgacaattgacaaattcaactttgccggtaaaaaggcaattgtccgcgtggacttcaatgtacctttggacgaaaatggtaaaattactgatgatactcgtatccgcggtgctcttcctacactgaagaaagtgttggctgatggtggcagcttgattatcatgtcacacatgggtaaacccaaaggtaaggtaaatgctaaatattcattgagtcagattgtcgatgctgtttctgaaaaattaggtgtacctgttcaatttgctcctgattgcgcaaaagccggtgatgctgcagctgctttgaaaccgggtgaagtcctgttgttggaaaacttgcgtttctatcctgaagaagaaggaaagcctgttggcattgacaaagaagatcctgcatacgaagatgccaagaaggcaatgaaggcttctcagaaagaatttgccaagactttggcttcttatgctgactgctatatcaatgacgcattcggtactgctcaccgtaaacatgcttctacagctgttatcgccgactatttcgatgcagacaacaagatgttgggctatttgatggaaaaagaagttcaagctgttgataatatcctgaaagatatcaaacgtccgttcactgctattatgggtggttctaaggtatctaccaagattggtatcattgaaaacctgatggataaagtggataacttgatcctttgcggtggtatgacttatacttttgctaaagctcagggtggtaaaattggtaattctatcgtagaagatgataaattggaattggctcttgatatcatcgctaaggctaaggctaaaggtgtgaatttggtattaggtacagactgtgtagctgctgatgcattctctaatgatgctaatactcaggttgttcctgcaaataatattcctgacggatgggaaggcttggatgcaggtcccgaaactcagaaagcatttgctgcagctattgaagatgctaagactattctttggaacggtcctgccggtgtatttgagtttgataactttactgccggttcacgtgcaatcgccgaagctatcgctaaagcaactaagaacggtgcgttctcattgattggtggtggtgattctgtagcttgtatcaacaagttcggtatggctgaccaagtatcttacatctctaccggtggtggtgctttgttggaagcgatcgaaggaaaagttcttccgggtgttgcagcgatcaaaggtgaataattggtacttctctatataaaagaaaggcaacccggtttcgagttgccttttttagtattttgttttttgtagtgaattctatatcttagaacataaacaacacggtggctaccagtctgttgtttgaaacagaatgggtatcaatgattgttccatctgacttatctagtgaaccgtaccatgcagaactgaaattatattccacaccgattttccaatgaggaacattataagtcagttcggcactggcactgatcaattgatctacatttgtacctgtgccatacattttggtaacctcatcgctggtgcctaaatttttcatgtaaccaaagaaaacagccggtttccattttttgccatacacaatgttcaaccaagaactggagttgcggttgggggaatattcctgttcacctgttcgttggtctattgattttatgccataacctcccagcatagaaacctgtgtaagattggaacctaatatgcttttggcagctatataccatacaggtgaagtatatttcatgtgaacttcataagacagagaagtgatacgttcatctactttatacactttatcctctaccacagactgagtacggggttttaatgaaaccatttcaatacctgcacctaccaaccagttgttacctttgtaatctgcaccgatatagacttccgggatacagctttctttgatgtatttctggctcttgccatcagggccttgtgacagatattgagattgccagatcgctgcacctgtcaactgtatatcacctgtcttgtagcggaaacgtatttgcggagcacggctgaacggttggaaaggagctcccatattcagattcaggatttgcggagcgacgtcaccatacagcggatgccaggtttgtcccaacagcaaggacggttttccccagtctaagttcaaatatgcatggcgcaggcgaacggtagagaaagtggttcctgaaccgcgaaagtccatttccactttagccgaggtttttgccctgcccagtttagggccttgaacgtcgactcccagacgagtgtacaaggtatagaagcttccattggctgttgcattcaggtcttttccgtctgtatcatatattttgtctttgggatacatatagaaaagtccgtccacagtttcttcgttggcacggctattgtaataaagatcggtgcgaacttgtccgtaaaacttataactgaaatctttgttttgggcaaaactgcttgccgatagcagtaaaagtgtgaataagaatgaatattttctcatgatttaaagggttgttataaacattcggcaaaattacataatttatttgaaaaaggctgtgtggttcctcataaaagtgtcatatcgcgcttggatggaacagcctgcattgaattgcacaaaagaaactgtccgaaagcaaaagatagcttccggacagttgtttactttacttctttcgtggaattaatagatttctatttcatccaatgccattgtactgggcacttcgctcttatcatgcggactatagcaatcaatgccattacgtattttgcctccgcttgtaaattctattttcaccttcacagcttcttgtgccgggaattctatttcttcatcgaatcctttgaaggtgttttctttgatgtcataggtaaattccttttcggccactttctcgaatttattgcctgaggcggaaacatacaccacagctttgcttaccggtaatatattgccggctgcattataaagcgtaccaaatctgattttactgattgtagctttatcaaagtctgccacgaaggtcactttatcattattgtccgggcggatacctacccatggagtggaagaggcattgttcccacgttttccgttggttagtcctaaagtcaccgtatcggcccctaatatgtcattttctcctaaaatatcccccttcattcctttgggttccggagtgatttcatatttctttccactgattaaattcttgtaaagttgtttatgggtaactttaccaatctgcttaccgtcaacaaaggcggcggctttcaagtcgtaagtaccttccaatgggaatggatggctatataagctggcatttacagacggttcctcaccgtggattgtataatagatttgtgctcccggatagaatgtttccagttctacattcagtactccttctttagtggaacgggtattaatgtttacatcaaagaagttgaggcatggttttacccccattatttccagacgtttgaaatcttctaccatgcggctgcagaatgaagtgaaattcttctccttcatcggagtccatccggtctcggctatggcgattaaacgtgggaagatttgatagtcacgattgtcctcggttggcatatattcagcccagcaattagcttgtacgcctatgatgtgttgttttaccagactgtctgcatcagccggtacaggattgtaactgtatgttttcttcaatgtgttatacccaccgatagtgacaggggctatttccggttcttcttgataatgatcaagataagcgtaaggattgggagtcatgatggcatcatgcccggctttggctgcggtcattccgccttccacaccacgccatgacattactgtggcgttgggagcaagcccgccttccagaatttcatcccaaccgatgatgttgcgtcctttgctgttcaggtatttttccgcacggtttacgatatagctttgtaacttctcttctttggtatgctttctgccgtctacgggattaggagtgacatcatctttaagccctaggtctcgtatcagtttttggcaatgggaacaatgttcccatgcgtatttggggcattcgtcaccacctatatgtatataagaacttgggaataattccaccacttcgtccatgactccttccataaattgaaagaaagtgtcggtagggcagaatacctggtcaaacacaccccacagtttgcaaacttcgtaggtgctgtccggagtacaggataattcggggtaagaggcaatggctgccaaggcatgtcccggtagctctatttccggaatgacggtgatatatttgctttgggcgtatgctaccacttctttaatttcttcttgtgtatagtaacctccatgaggtttgccgtcatatttaaacgggtagtgggtatagaaataatccaccatggtttctgaacgttgggaaccgatttcggtcagtttgggatactttttgatttcgattctccagccttggtcatccgtaagatgccagtggaaggtattcatcttatgtacggccaatacatcaatgaattttttgatgtaatctatcgatgcaaaatgacggcatacatccagcattgctccgcgatatcggaacgccggagtatcttctatctcgacgcaaggtacgctccattcggcattgcgtgctctttccttgctataaatagctaccggcaacagttgatacagagtttgcagtccgtaataaaatccgttaggtgttgatgctgtaatctttatctgttggggggtgactgataatttgtaggcttctttctccatacccggaatgctgtcaaaaacaatggtgggtacattttcatgtaattcaccacccggtttcaatttgataccggctacatccaatacggtagttgatagactggaagcgatatttttcacttcttgtgaggcgttcacaacgacaggaacatcgctgttcagataaaaacgtcccggctgctcattcatagtaacaggcagcggaactacattgtactcattgattacttctttcatttggcatccacacgttaatagcccaacgaaaaatactagcagactcttttttttcataatatatctgtgctaagtttttaaataaagggggtatagaaattctttgcggacaaaaatagcaataaaaacggaataaacatgtttttcagagagattaatatgtttacaatataaaaatatttttcacagatttgtttctttattgctaatagaatgttatctttgtccgagttaaccaatttattaatctgacacacatgacagcaaatacccccaaacgattgctcgctcttgacattttgagaggcatcaccattgcaggcatgattcttgtgaataaccccggttcgtgggggtatgtgtatgctccgctggagcatgcctcctttaacggattgacccccaccgatctcgttttccctttttttatgttcattatgggaatctcgacttatatttctttgcggaaatataattttacttattcacatgccacgttgcgtaaaataatgaagcgtacagtcattattttttgtatcggtctattgttgaatcttttagctaagtctgtttttacacatcatctgaattttgaagaatggcgctatctgggagtcatgcaacggctcgctataggatacggtgtgaccagtctggttgctataacggtgaagcataaatattttcctgctatcattttggtgactttggccgcttattttcttttattggctacgggagacggcttcaatcagtcggaaaccaatgttgtggctcgttttgacgcatgggcattgggcacatcccatatgtaccatgagggcggaatggcgtttgatccggaagggctgctgagtactgttcctgcggtgtgccatgtgatggtaggattttattgtggaaagttgttgctttccgctaaagataatgccgaaaagatacagcggttgtttctgataggaactatacttacatttgccggctttctgttaagttatggctgccctattaataaaaaagtgtggtcgcctacttttgttataataacttgtggattggcgtccagttttttggctctgctcatttggattattgatatgaaaggatatcagaactggtgtgcttttttccggtcattcggagtgaatcctttgtttatttatgtgtttgcggaaacaatgggaatcgcattgggtgctacgggcgtgagtgcctttatttatgaaaagatgctggctccggcattgggggattatcccggctcattagtctatgctttgatctatattatattctgttggagcattgttcatatattatataaaaaaggcatctatatcaagatttagaaacggatacagaaaattagttagatgaaagaaacggggaatatttttatgtcagaactgacggaggtgtttagtaaacgtcagcaacagtttattcagtttgcttactcgtatgtcagggacaaggaagaggctgaggatattgtaatgggggcgtttaccaatgtgtgggagcaccggaatgaattgcgggaggatacgaatatttccgcattgttgttgacagccataaaaaatcgttcactgaatcatttgcaacacttggaggtacgtatgcgtgccgagcagcatataggagatatacggcagaaagagctggctttgcgtatctcgactttggaggcttgtgatcccgataaattgttttgtgatgagatacaggctttggtgcaggaagctattagtgaactgcctcctacaagcagggaggtgtttattttgagccggatgaaaaatttaccgaacaaggaaattgctttgcgactggatatttctgtaaagactgtggaatttcatatcacccggtcgttgaaacagttgcgggtgcggctgaaagattatcagtttctttggagttttttgtaaaaaaagccatacctcagttgtttgggtatggccttctttttaatttcatatacagggattagaaactataatctgcacttaaaccgaatactttgttagtacggctgtatacatttgttccgggtaatccggttccgttatagttggttgacttcttggtataatcctcataattagtccacatatagccgacattcagattgagatgcttgttcatttttattttggctccgactcccaaagagtaagaatcacaagagaaactagtatctgattgatagttatctgatagtccgtagtcagtgatctgtccaccacagctgagggtcagttgtttggttacatcaaactcgatacctgccaagtattcattggttcctttagtcagatatttttgtttaccgtttgccatacctgcgtttttatcatcatagaaatgatattctacagaagcacgaagtaccggaaggaattcgtaggcggctgcaatggagagcatggctgggatgtcattgggagtattcacaccgtgttcgtagggggctaccatatctttggcactgggtggatattgtaagttctttgtattgttttcgatattcagattggtcttgaactcatatttagcaccgatattcagtttacccaatttaacatctgcaccgattacaggagtgagtccccaacctgtttggtcacagtccagagcgagtggcaacaggttggtatctgttcctttcacaatggcattcaagaatcctttataaccgcctgtaaaatagttcatacgtcctccaccgaatacagaaagccattcggtagctttataggataatcccaactgtaaagagtaaatatattgtttaccatccatggcgcttgtgatatcatacatgccgggaacgattatcggactttgtgggtttgcctgatgtgctttcacactattctgaaaaataccggccatggccgcagattcaaacataggcaatccgtcatcgaaagatgcttttccacctccggcggtaatagcgaagaaacctgaaatagtccatttgtcttttttataggctgcaaataaactgggaataaccggtgcggctgccgttccttcataatatttttcgaaaggcttgtctgcaacggtaggacctgtggcgctaaccccgttgtatgtcataaaactagcatcaatatttctagtctgataagcactttgaatgctcaatcctacatggaatccgtctttgggtaagaaagccagtccggcaggattagacaaagcaccatctatttctgtagtagcaccacgggatagcatacggagaaaagctgcatgttgatttgtattggttaaaatacctcctgcgaaagttgaatttgaaacgattagcgtcgctgcgctaattaataatagtttcttcatttattacttaatttttttgtttgcgggcgcaaaggtaggataaaataacacgcggacaaaccttttgtgcaattatttgcataatctattgaaaaaatcaactgtttcagtagaaactatttaattttcttcgtttatttcagaaggcttttgacccatgattttctgagtgttttttagctgttgagtgccttgtggattacttgtggacgaactttttttaattaattctttgtcttatagtaggttaatgcctatgctgtggacaagttgtggacttatcgtggattttctaccttattatattaaaacaaagaaagaaacaaagaaaaactcccttaagggttctttgaaaaaaacgtccgtcatgttctgtcaacgctcgggtcgttttttcaaactatgctggaaacttttgccaactatgctggaagttcccggaagtttccagcatagtttggacatgatatgccttttgttccggaatggttatttccaggaataaattctttgcctgtttacagattcttcaccacattcagcatggtggattgagaagaatgttgtatttttgtaacccttttacgcaatacaaattttttatatgtatactaacaaagaaatatggaacgtgagttatccgatttttctcggattattagcgcaaaacattataaatgtgacggatacggctttcctgggtagagtgggggaagtcgaactgggagcttccgccatgggtggattgttttatatctgtgtctttactattgcttttggctttagtatcggttcacaaattttgattgcccgtcgtaatggtgaagggcgttacaaagatgtaggccctgtgatgatacagggaggaacattcttgctggggctggcggtgctcatgttcgggctgactcatctgttggctccatctgttgtccgtctgctcatctcatctgattccatttttgacgccaccatggaattcctcaactggcgtatctttggttttttcttcgcttttatcaacgtaatgttccgtgcgctgtatattggcattacacgtactaaagtgctgacgatgaatgcggtggtcatggcattggtgaatgtgttgttggactatattttgattttcggtaagtttggaatgccggagatggggattaaaggagcagctatcgcttcggtgatggctgaagccgcttcattggctttcttcttgatttatacctacgcaaaggtggattttaagaaattcggcttgaatcactggcagaagattgatttctctttattgggaaagattctgagtatatcgtgttttaccatggtacaatattttttggccatggctacttggtttgtctttttcatcgcgatagaacggttgggacaacgcgagctagcgattgccaatatcgtacgtagtatctatatcgtgatgctcattccggttcaggcactatctactactaccaattccttggtcagcaatctgatcggtgcgggaggaatagcccatgtcatgcgcttgatttggcgtatcgcacggatgtcgttcttcatcatgatagtctgtgtggccatagtggtacttttccctcatgctatgctttcggtttataccaatgagcaggccttgctggtggaatccgtgccttcgttgtatgtcattgctgtggcaatggtcatcgcatcggtggcgaatgtctatttcaatgccatttcgggaactggaaatacgcaggctgctctgatacttgaaatggggactttgatgttctataccctttacattctgtggataggcatggtagtgaaagcaccggtttcggtttgtttctccatagaggtggtgtactatagtttgttattgcttagcagcgttatttacttgaaaaaagcaaaatggcagaataaaaagatataaggttcataagttttttgtatttttgcaccctgttgttattctgaaggttagtaaagaatgacaggcaatcataattcgtaatttataattaaagatatatgttcgataatttaagtgagagactggaacggtcttttaagattctgaaaggtgagggaaaaatcaccgagattaatgtagcggaaacgttgaaggatgtgcgtaaagctttgttggatgctgacgtgaactataaggtcgccaaaggctttactgatacagtgaaagaaaaagctttagggcagaatgtgcttacggctgtgaagcccagccagttgatggtaaagattgtacatgatgaactgaccgcattgatgggtggtgaaactgccgaattggtgttggaaggtcgtccggcagttatcctgatgtcaggtctgcaaggttccggtaagactactttctccggtaaactggcccgtatgctgaaaaccaagaagaaccgtaagccgctgttggtggcttgtgacgtctatcgtcccgctgctatcgaacagttaagagtattgggagaacaaatcgaggttcctgtatatagtgagttggacagcaagaatccggtgcagattgcattgaacgctattcatgaagcaaaatcgaaagggtatgatttggtcattgtcgatacagccggccgtctggctatcgatgagcagatgatgaacgagattgaggctatcaagaaagcgataaatccggatgaaactttgtttgtggtcgattcaatgaccggtcaggatgcggtgaatacagctcgtgagtttaatgaacgtctggactttaacggcgtcgtgctgaccaagttggatggtgacacccgtggcggtgctgctctttctatccgtaccgtggtaaacaagcctatcaagtttgtgggtaccggcgaaaagttggatgctatcgaccagttccatcctgcacgtatggcagaccgtattctcggcatgggtgatatcgtgtctttggtagagcgtgcgcaggagcaatatgacgaggaagaggcaaagcgtcttcagaagaagattgccaagaatcagttcgactttaatgatttcttgagccagattcatcagattaagaagatgggtaatttgaaagaacttgcatccatgattccgggtgtggggaaagctatcaaagatattgatatcgatgataatgcgttcaagagtattgaagcgattatttattccatgactccgcaggaacgtacaaatcctgaaattctgaacggaacgcgccgtacacgtatagccaaaggtagtggaaccagcattcaggaggtaaaccgtctgttgaagcagtttgaccagactcgcaagatgatgaagatggtgaccggcagtaagatgggtaagatgatgccgaaacttaaaaagtgatgcttaaataaacagataagggagaaagtgtgaaactttctcctttttttattatgctgcatggctgatttatactacatttgttgctcaatgaataatttataagtaaatagatagtatgcaactaattgatggaaaagctatttcggaactggtgaagcaggaaattgctgcggaagttgccgaaatcgtggctaaaggtggcaagcgtccccatttagctgcaattctcgtcggacacgacggaggaagtgaaacatacgtagcggccaaggtaaaggcttgtgaggtatgtggtttcaaatccagtctgattcgctatgaagcggatgtgacggaagaagaattattggcaaaggtcagagaactgaatgaggatgctgacgtggatggtttcattgtacagctccctttgccgaaacatatttccgagcagaaagtgattgaaaccattgactatcggaaagatgtggatggttttcaccctatcaatgtaggccgtatgtccattggtcttccttgctatgtatctgctactcctaacggtattcttgaattgctgaagcgttacaacattgaaacccaaggaaaaaaatgtgtggtattgggccgcagtaacattgtaggtaagcctatggcaagtctgatgatgcagaaagcttatccgggtgatgccactgtaactgtttgccacagccgcagcaaggatttggtaaaagaatgtcaggaagctgacattatcattgctgcactgggtcagcctaattttgtaaaggctgagatggtgaaagaaggtgcggtcattattgatgtaggtactacccgtgtgccggatgctacaaagaaatccggattcaaactgaccggcgatgtgaaatttgatgaagtggctcccaaatgttcttatatcactccggtgccgggcggtgtggggcccatgactattgtatctttaatgaagaatacgttgctggctggaaaaaaggtcatttacaagtaagtgccatgcgctttgcgaagcttgatggataaaaaagaatgtgtcaaaagtttggtaatgcttacaggataagctgacctgcttttgacacacttgttttcatgaacaaaagttatgcctgcttttcggacttacctgtaaaatcataaggaaggattttcgctcttaaaagattattttgttcttcggaatgactatattttcgggagtgtccttgatgtataggtctttctcgctgggaagttcgggacatttatgccctcatgctctcactgcatgtataataggtttattataaaagatttagatggtgagggtaaaaaatattgctctcacttatgctcttatgccctcattatattttgaagctgaattttgcataagaggcttgaaaacagttatatatattctttttataggctattccgttttgatgtaaagtaggctatttttaggctttttttcttgtaagaagtgcgcatagaggatttgtacctttatggaatatggcggattccggctgtggtaaaaaagatcaggtcatttttaaaaaagatgacgagctttttttaaaaggccgccgtcttttttaaaaacgtcttggtcttttttttaaatgtccttgtcttttggactggcggttggcatgcttgctgacgtagtttctgttggggtcattgtcatcaataaggcatgtgtgtgatatataaagatttgttgcaaatgcttgtagaccctctttctaatttttatttgtattattcgcttgaaaaaaacgatggtactgctgtttcagaacgggtacaggttagtgaagcctgttggcacagttcggggttgctcctacggaattcaagcgtatgaaaactgtaaattagtgtagaactttgttctttacgaattttttcctatcttgtaccctttaatattagaatagatgaaacagatcttcattctttttttgctatggtttggtttgtcgctatcggcgcaagatcagatctctttgttgtttgtcggtgatttgatgcaacatcaggctcaaattgatgcagccaggcaaggagacgggtataattataatgattgtttccgtcatgtgaagaaagaaataagtgaggcggatatggctatagggaacttggaggtgacattgggaggaaagccttatagagggtatccggtgttcagtgctccggacgaatatctttatgccataaaggaagccggatttgatgtattgctgaccgctaacaatcattgtctggataaggggaaactggggctggaacgtactatcctgatgctggattctttgaaaatacatcatgctgggacctataggaacccggaagaacgccataggaactacccgttattgattgagaaaaatggttttagaattgcattgttgaactatacttatggaacgaatggctttaagactgatgctccgaatatggttaattatattaatctggaacagataaaaaaagatattcttgatgcgcgcaggaaacttcctgatgttattatagcctgtatgcattggggagtggaatattgttcgttccctgaacgatcggagcgtgaactggctggctggttgattggacaaggagttgatcatgtaataggttcgcatccgcatgtactccagcctatggaaattgtaaaagactcccggactcctgcccggcatgtcattgtttattcattaggtaattttatctcaaatatgtcgaaagaaaaaacggatggaggagctatggtgagattgaagttgcaacggatttttcgaataactcgtttagcggattgtgaatatgcgttggtttggacttcgagaccagttttaagtaaaaaaaagaactttgaattatatcctgttacttttataaataaatccattcataatgaggaacttaatgtgatgaaacgtttcttgaaaggaactgagaatttattagggaaatcgaatggaggcataaaagagtatttttttgaataatttttcctcaaaaagtttgcggatataaaaaaaaacagtacctttgcatcgctttcgaaaggaaagcctaacatggtgactatagttcagtcggttagagcgtcagattgtggttctgaatgtcgtgggttcgaatcccactagtcaccctttaacatatgaaaggttctgtaaatctaatgatttatagaaccttttttcagtttttatatctattagtgtactatcatggtgataaatttaaaagataatagcgaaaaggataagtatatcttggagttgttccggacatctcccaaggaggcttttcgtttattatttgatgcttatcacatgaaattatgtatatatgcagtgcaactgaccgattcttttgagatggctgaagatattgtgcaggatttctttatctatttttgggagaagaaatattacttgaaaataaatcaaaatcttcgttactatctttatttgtctgtgcggaatgcggcaatcaatactttacagaaaaataacatgttatctatggaggaactctcaggtcttgatatgagtattcctgaagagtctatagatgaagaggagcaagaggaacgaaataagttattattggaaaaattacaaaaattacctcgtcaggaattacaagtagtgagagctgtcattatggaaaataagaaatataaagaagcggctgaagaactccatatttctgtgaataccctaaaaactcatctgacaagagccttgagacaattaagaaaagaatacaatctacactcactgttttactaaaattaaatttttcttcttttcctgtcacccatttattaatttgggctctcttttattaaaagaaagtaatcgatgaacaaagagaatccaaaaaagaacaaaaagtcttttgagtattatatagcgcagcgaaaagaagaatttcgttgtcaatatgatcatgaacgttcatgggaaaacctgcaatacaagcttgaaaaaagaaggaaacgccgtatcagtttatattgtgtagcggcatcagcggctcttctttttcttattttaggaattagtcatatattctctctccacaataacacgcaaaacaaggaggctgtagtggctgctgtgatttcatttccggaaacaggcagccgcaaggctatccttactttagagaatggagaaaaagtggacttgtctgttaaaaaaggtactatttctaatgtaaattctactgtaatcaataataatgccaatcaattattgacttatagaaaagtggaagaggtttcttcaactcctcagattaatacactggctattccaagaggaggggaatatcagttgattttatcggatggaacaaggatatggatgaatgctgaaagtcttttacgttatccaacttctttcgttggagaaaaaagagaagtatttctagaaggggaagctttttttgaagtggcgaaagatgctaaacatccttttatagttcatacaaacagacattcggtggaggtacttggtacaagttttaatatatctgcttatcctgattataaggtatatacaactcttgcagaagggcgtattaaagtaagtacagctaaagtttcggttgtgttaaatcctgaccaacaagcggttattgaactggataatgatgatatagtgacacgtgatgtgcctgcttatttatttacttcttgggcgaagggaaattatgagtttcgtaatacgtctttgtctgaaattgttgcccaactgtcacggtggtataatgtagatatctattttaaaaatgaatctttgaaagataaaagatttgcaggtatcatcttcagagatgaagagttaaattttgctattgaagtaattgagagagtgtctaatgtacattttacccgcgaaggagaaacgatttacattgaagataagcacgaatgagaaagtaaaatgataggagagaattgactttttttaataataaatcaacaaacaattatgagtacaaaacttttgagcgaaactatctgtcgcaaaggcctcatggtgaaatgctttgttgcattgatagtattttgttgttcggtgggtgaagcatttgcccaaacggatactaaagtgactatcaatgtgaacaatgttttaatcagaacagccttggatcaactgcaaagggaagcaaagatccattttgtttacgatgaagaaaatattgattcaggaaaacgggtaagtttattttacaccaaaacttctttgaatgcggttttggacgatttttgtaaacagacttcattacgatatgaagtaaaaagaaatttgattcttattttaccttcaaaggctgagaaaacaaccggaaaacatgaacccttttatatgacaggtgtggttatggatgaaaccggagaaagtattattggagctaccattatgattggaggtacaagtcagggtactgtaaccgatatagatggtcggtatagtttgcgggttactcctggtgatttagtgtcatttacttttgttggaatggcagataaagtagtcaaggtacaagctggtaagaaagtggtgaatgtgaaaatggaaactaatgccactgcactggcggatgttgtagtaactggctatcagactttgtccaaagaacgagcaacaggatcttattctgtgatttcagagaaaagtacgaagggtaaactggaaacggatgtgttgtcacgtattgaaggattggtagcaggtataaataaaacttcaagcaacagtaatgatgttgttattcgtggtattactacttatatgggaaatacaaagccattgtatgtggttgatggtatgccttatgaaggtgatttagcatcaataaatcctacagatgtacaaaatataacagtattgaaggatgctgctgcaagttctatttatggtgcccgtgcggctaatggtgtaattgttattacaactaaacgtggacaggaaggtaaaactaaagtaagttataatggtagtattaagttgtctccaaaaccggattttgattatttgaatttgatgagtagttccgagctggtagatatgcagattgaggggtttgattattatcatacggcttatgagaatttgaataagcgtcaagctgtaaatccggtagttagcttattgtatcagcatgaacgaggtcaactgacagatggtcaattggcagatgctctgttaccttatcgtacaaatgataatcgtaaacaaatagaagatgaatttgcgcgtgtaggtattgttcatcagcataatttagctatttctggtggatctaataaaaatcgatacatggctactgttaattatatgggtgattatggtaatcaaaagtatcaaagtaaagatcgtattggatttagcctaaaagatgatgtggatttttttgattggttatcggctgattttggagttacaggaagcttttatcgttcaaagggtgataatggagcaggtagttatagcagcttgatgagtagttatcctagttattatatgttaagggatttacagggaaatccactagattttcaacgtactaaatcagattatgaattgcaacgtttgcaaagtataggtttgatggatgaaacatatagtccgataaagaatcgtgcagaagaaagctatcataataattccaattattatcgtttgcatgcaggattgaaatttaaaattctagaaggtcttaatattgatttaaaatatcagacagaagggacttatgataaaaatcgtactttatatagtaatatgtcatataaagtgcgtaatatgataaatgatgcagctcaatatgatgcggcaacaggaagccttacactgaatgtccctaaaggtggccaattggatgaaagtcgttatgaatcttattcgtatacaatgcgtgctcaggtgaactttaatcgtatattgggaaaacatgctatatctgcgttgggcggtgctgaacgtcggttggtgcgtcgtactggtgcgcagaattattatatgggatatgatgataatagcttgggagtaaaacctataaatccgttagttatgtctcctattaatggtactgaagctttgttggggtcgtttaattgggtctatggtgaatataatgcattgactcatacagaagaccgatatgtttctttttatgctaatggttcatatacatttgacgaacgttattcattaactggaagtattcgtatcgatcaatctaatttatttggtactgatcctaaatatcagtatcgtccgttgtggtccgttggtggtagttggcagatagctaatgagccttttatggaagattgcacgtggttgaatcgtttgaacttgcgtatgacttatggtgtgggtggtaatgttcctaaaaatgcaggaccgtatatgactgtggttgatagcggatataatgattgggttggagattttggttcgtatataaagaatccacccaattctcaacttcgttgggagaaaacggcttctaccaatgtggggcttgatttttctgtattcaattctcgtttaagcggtagtattgattattattataagaaaacgacggacttgttaggaaatcgtaatgcggatccgactttaggttgggcaagtttattgcaaaattatggctcgatgtttaatagaggtgtagaattgtcattacagagtgtaaatattcaaaataagaattttacttgggggacaaatttaatgtttagttataataaaaatgaattgactaatttagaaggtacgaaagaaacggttttttattatagtgcatataatgtagcagctgttggttaccctattaatagtgtctttagttatcgttatgcaggacttaatccgacaaatgggaatgtgttggtgtataataaagaaggagaaaaagtttcaaaagtaagttctattgatgatatggtgtattctggaactcgtactccaaagtatacggcatcattgaaaaatttcttctcttatcgtgattttgatttttcatttatgtttgtatattatggtggtcatgtgttacgtgatgttgtagctggatatatgggtggtgcaccgagtgcgaatcttactcgtaaggctttaaaccattggaggaaaccgggggatgaaaatattccaggagtagctccgtctttcaataggaatatttattatacagatgctcagacatggtattcggcagacattcatgtaaaaaaggcagattatatcaaattgagagatatctcattgagttacaatttgccaaagaattggttgaggaaatattttatagaatcggccgcagtgacttgtcaaattagtaatgtgtggtggtgggctgctaacggagatattgatccggaagcgtatactacatcggggtatggatggggagcattgactcttccgaatcctactacttatacaattggtttgtcccttaatttttaaatgattgaatagataaatatgaaattatataaatttttactttgtgcatgtttggcgttacctataatgtcatgtgatgattatttggatatacaacctaaagggattgtaattccggaaaagagtgaagactatgaacgtttattgaattatgctcaattgctaaaagcttcagaatcatatcctaactttatgacagatgatgttttcatgccttatgaagatgatatgactggaggatttgtttctctggagttgccgaaccagcatttatatgcgtttaatagtgaaatctttggagaaggagagagtgacggtctttgggaatactcctataatcgtatttattattataacgtagttattgatgatataatgggagctactcaagatactgaagaacataaaaagcaattgagggctgaagcattggttgggcgtgcttttgagtatttgactttggttaatgcttatgctaatcattacgatccgtcgactgctgctacagatcctggcgttccattgatgttggataaaaatatcaataaaacaaatttgcagcgcgctacagtgcaggaagtatatgatcaaattaagacagatctggatgaggctgctcctaatttaccggaaaaaccggtgttgaatgcctatcgtgcatctaagccggtggggtacgggatgttggcacgtatgtatctttatatgggagattacaaaaaagctttggagaatgcggtgatctcattacagaataattcaactttgatgagtcttttcccgtataaagtagtggatcgtgataaatatattggtaggatcgatgttccggatggagatgagaatccggaaaatatttatattcgtttggctccatggacttttggatttagtgctactgcatatgcttctgaagaattggcgtccttgtatgatcaggaaagggatcagcgttatctgttgtattttacgaaatatttaggtggaatagatttggattatcctctttgggcaccttatatttatgccaacatggctatgtctactccggaaatgtatctgatagcagcagagtgtgaagctcgtataggtagtaaagacaaagctatggaatatattaacaccttgcgtgatagtcgtattattgataatgtacctttggttgcaagtgataacaaggatgcattggtaaaagtcttggaggaaagaagacgggaaatgcctatgcttggctgtacccgcttgattgacttgaaacgtttgaatcgtgaacctgaatttgcaaagactattgtgcatgaggtgaatggtgtagagtacaaattggaacccaatagtcctaaatatatcctgaattcaaacagacaatgcaacagtgtcgaattcattgttagttaataatttatatttttcctttggggtcatgtaacccaatctttttctcggtcttgagtttaagatgttttgaacgcgcattacctgttcattggttatgtccctaaagtccgtacccttcgggaagtattgcctaatcaaaccattgctgttttcattggctcctctttcccacgagtggtatggttttgcaaagtaaacaaaaatatttagtttacgtgcaatttcttcgtgaaaactaaattcttttccattatctgccgttattgtatgtatttggtctctaaaaggttccaaggcatcgatggcagctttagttagcgggctggcatctttcccgctaagtagtcttatccatactagtccagttaccctgtcgtttatagttaatagtgctcctttgtgattcattccaatgactgtgtcaatttccaaatcaccaaaacgtactttcttgtctactatcgtaggacgcttgtctatgtccacgcggtttttgataaaaccacgtccattagtcaatgcacctctcttcttatgacttcttccccgtcttcttaaatgcttgtataacaacttatctccatgctttttatcttcccaaatatactggtagattgtctcatgagaaactgtttccaagccctttgttcgcataaacccagtcacttgttctggactgaaatctttctttatgagtatatctacttgaattttcaagtcgtccgtaaacttcacgaagtgctttcgtgaacgcattctggacatatacttagcctgagcgagatccggtttgtaaatgccattacgtttatcactattacgacgtaattcacgacttatagtgctacgatgaactcctacaagattggcaatctcggttcttgactttccgctttgcagataagcggaaatgttatacctttgttcttcggttagctgtttcatattgcaactgaatgttggggaactggaagatgcaaagaaacaacttttccacaggggaacaaaagggaaagaaatcttctttctctgttcctctgaaaaattattcttttcgtatcttctcattgtcatcattctcactcctgttgcattatccgcttgaacttaggtattttgcctattccacccactgtacttcgttttaatcctgatatgattcctaacataagataaaagatattttaatgaaaaaattaacgattatgatggcaacagcagcattatgctgttgcctgggttcctgcaacagtggaactaagcaagaattggcgaatactgttcatttgaaaggtcagttgcttgatatgggtagccagaatgtgcgtatgagatttgatggagcggcatctatgctaggcgatagccgggatattttgttgaaaacggatgcttccggtcattttgatactacttttgtacttaaagaaccgacatattatactatcagccgcaacacattgtatcttactccaggagatgacatgactatcaaagtaactcagacaaatacagaagcggaattctcgggaatcggagccgaagtcaataattacatgaagttccgtcttttcccgaaaggaggttcttatctggaagccggtggtaacttgcgtggagattttgtatccactaaagcgttggttgacagcttggccgctatacgtatgtatacattggatacgttaagtaatgtgtctgatgcatttaaaaagctggaaacagcacggatcaaagcggatattattaatagttatatctgttatgcaagttattcaaggatgtttgccggagtgaagaatgaagaagagatgcgggctaaatggaatgaatttaatgtttcattaactcaggatgtaactccgctatataaggagattatgaatgaagatatgctgaatgtagctgtggtgcgcgatgttttgtcttatcaggaagattctacattagcttctctttggtttaaagatatttccattcctgcgcgtactacggaattatatgcttgtgctaaaatagttgataatctgagaaatgaagcttctgaacagactgtgaatgaggcgaaggcatttttgcaaacagtgaagaatgctgatttcgtgacagaaattgaaggaaagattgttcaagcttccaagttgcttcccggacaacctgccattgattttgagatgttggatgtggaaggcaatgtgaagcatcttgcagattttaggggtaaggtgatttatattgatttatgggcaacttggtgtggtccttgcattcaggaatctccggcatttgaggctttaggtaagaaatatgcgggtaaggatattgtttttcttccggtttctacagatactacaacgaaaccttggttaaggtacttggatggacataagaaagaattgactcaatatcattccaatgatgttgctttaaaagaaagttgggctatcatgtatattcctcgttttattttgattgacaaggatttcaatattgtgaatgcatacgctccacgtccgtcaagtgaagagattggtactttgattgattctgttcttaataaatagtaaatttatgatttataaaaaatatctattattaggcgtttctttatgcatgttaaatgcttgcaatgagtctaagtctgtgtctttagagggtagtcttgatggaatccaggctgattctatctatttatatcaagtggacaatgagcattatggtagtgtgaaactgattaaatctattgctgttaccgatggtagatttgcttatcccactgattctatacaagtcggtctttattgtttctctttgcagaatatggagcgtggggagtatttacagcaatacgctaatttgtttttggaacccaaatccatgcagcttaccttaggcaaggataagtatgaccaactgagtttacatgctacagggtctgcattgcaggagcaatacgaagctttgctagaagcgaaatatatagcaggtaatcgtacggttctcgattctttggatcatatgttctatgcggctcgtgaaaaaggagatcgtgaggaaatggagcgtatccgggaggtttccagtccttattatgagagtgcctcggaacagacccgtaaactgataaatgaggaaattgctaaaaataaaggctcatacttcggtttgtatctttattatacttatcgcttccaaaatcatacttttaatacagttaaagagattgatgaggcacgtaacttcataggcggttttgatgaggtgtccaagcaaagtggtatatatgtaaaaatgcaagaaggtttggataaatttgctaagtgtgctaccggcagtgttgctcctgctataacaggaattgatttgaaaggaaattctgtcagtttgaacgatttcaagggtaaatatgttctagtcgatttttggtttgccggttgtagttggtgccgtaaggaaactccttatctgttgaagacgtacaatgctttcaaagataaaggatttactatttatggtgtgtctacagaccgtcgtgaggaagattggaaaaaggctattgaagaagacaagagctattggaatcaggttctgttgcggaaagacgatgtgaaggatgtgttggaatcatattgtattgtcggtttcccacatataattttagtagatccggaaggtaaaattgtagcgaaggagttgcgtggagatgatctttataataccgtcaaaaagtttgtaaacggagcaaaataaagaaatgtgttttttaacaaataaagcagtaggctgggaatgtccagtctactgttttttcttttatgaaatatggagctttttgaaggaatgatattgttttattataggtagtggtattccgtattgtatttattttttaaataaatctaatgcatgacccatatttctctaatgttttccttttagagaacttattctctgtcggataggttaaaagtttatctttgtaccattattcagaaaagaaatttattgataaaatagacataaaaggatcaaaacgtataagtattgtaagcgtacaatacttttaggaggtctcgttggatgcttgtgttcagatttaaggcgagaccaccttattctcgtagagaatttagattttaatttagatgatacttgctcgtgatgagtaggtatcatttgttttttagtctattctgtatggaaatggcttgtaagattatacatagaagatagaataattagatcactctgccgttgaaatggaggatttgagcggattattttaattattggaagaattgttctatcctttaaagcatattgcttctatctttgccatactgagaaaaaacattaaaattacattattatgaagaattttcttatcttatctctgttgttagcctttttgactacggaagtatgtgcgcagtggaaaccggctggtgacaagatcaaaacacagtgggcaaataaaataaatacctctgccgtattgcctgaatatccacgtcctataatggaacgtaatgaatggaagaacttgaatggtttgtgggagtatgctatcaccgatttgggaggaaatgttccggcgcattttgacgggcagattttggtaccttttgcagtggaatcttctttatcaggtgtgggacaaagagtcggtgcaaaaaaggaattatggtattcccgttcatttgaagtgcctgttgcttggaaaaataaaaatgtattacttcatttcggtgctgtggactggaaagcagatatttgggtaaatgatgtgaaggttggtagtcatactggtggttttactccgttttcttttgatatcactgcagcgttgcctggtaagggaaataataaattagtagtaaaagtttgggaccctacggatgaagggtatcagcctagaggtaaacaggtaaataatccggagggtatttggtatactcctgtgactggcatttggcagactgtttggctggaaccggttactgccaggcatattgaagaacttcgaatcacaccggatattgaccaacacttactgactgtaaaagcccatttgaatatgagggcaccttccgatctgattgaagtaaacgtatatgacggcaatcagttggttgccactgggaaaagtattaatgatgaggctgtggtcatacctatgccggaagatgctaaattatggagtcctgattttccttttttgtatactttaaaggttatgttgaaaagcgataataaaatattggatcaggtgaacagttatgcagctatgcgcaaatactctacgaaacgtgatgctaatggaattgtacgtttagaactgaataaccaacctttgttccagttcggaccattggatcagggatggtggcctgatggattgtataccgctcccactgatgaggctttagtatatgatatacaaaagactaaagacttaggattcaatatgatacgtaaacatattaaagtggaaccggcccgttggtatactcattgtgatcaattgggaattattgtgtggcaggatatgcctagcggtgatcgtaatccggagtggcagaaccgcaaatattttgaaggtacggaaaaaaagcgttcggcggtttctgaggcttgttaccgtaaagaatggaaagaaattatggattgcttgtattcttatccatgtatcggaacatgggttccgttcaatgaggcatgggggcaattcaagactccggaaattgcagaatggactaaagaatatgatccgacccgtctggtaaatcctgcaagtggaggtaaccattatacttgtggcgatatgcttgacttgcataattatcctgctcccgaaatgtatctgtatgatgcccagcgagcgaatgttttgggagagtacggtggtatcggttgggtagtgaaaaatcatatttgggaaccggatcgtaactggggatatatacagtttaattcttccaaagaaataactgatgagtatataaaatatacagatatgctttatgacctgataaccaggggattctcggcggctgtttatactcagactacggatgtggaggtggaagtgaacggactgatgacttatgatcgtaaggtgattaaagtagatgaaaaacgagtgagagaagccaacgcacgtatctgtaaatcattaaagtaaggaatatgaataagctgttcttttgggtatgtgcagttcttatgactgcatgtacttcttataaaaatgatgaggtcttgactgaatccggtttaagtaaaagtcgttttcaaacggagataaatggtgagaaaactgatctgtttgtattgaagaataaaaataagatggaagtttgtatcactaactatggcggtcgtattgtttctgttatggttcctgataaagatggaataatgagggatgtagtattgggttttgattccatacaggactatatcaaatatccgtcggattttggagcaagtatagggcgttatgccaaccgtataaatcagggacgtttttcattggatgggatagtataccaattgcctcgaaacaattacggacattgtttgcatggaggtcctcaaggatttcaatatcgtatttatagaggtattcaagtgagtgacagagaggtgaaactgacttacttgtctaaaaatggtgaagagggttttcctggaaatttgaattgtactattataatgaaattgacggacgataatgctattgatattcagtatgaagcagaaacggataaaccgactgttgtaaacatgaccaatcattcttattttaatttagatggagatccgtcaaaagataattctgattatttattgactttgaacgcggattattatactcctgttgacagtacttttatgacgactggagaaattgttccggttgagggtactcctatggatttcagacttcctgctgtcattggaactcgtattaatcaagattttgaacaattaagatatgggaatggcattgatcataattgggtattgaatactaagggggatattcatcaagtttgtgccacattggagtcacctgttacggggattgtactcaatgtttatactgacgagccgggtattcaggtttattgtggtaattttctagatgggacattgacgggtaaaaaaaatacaatatataattttcgggcctctgtgtgcttggaaacgcaaaaatatcccgatacacctaataaggcagactggcctacggcagtagtgagaccaggagaaaaatatcaaagtcattgtatttacaagttttcggtacataaataatgtatgttaaggtagaaggaattgtggaatataacatttgggataaataagattcagagaggaagagtcctgaaagaagcggtgagggcaaacactggttcttttgggactttttccggataattattgatatggagaatttaatctttaattttgtactctctaaactaaattgatatactatgaaaagaatattcataataggacttctttttttatatgcatttactctttactctcaaagtaatatccgatattatttcaaaacattggatattcaagacggactctcgcaaaacacggtgaacgctattttgcaagataaacaaggtttcatgtggtttggaacaaaagatggtttgaatcgttttgatggcctgagttttcgtattttcaaaaaagagaattctgctttaggaaataattttatcactgcacttcatgaggataaagaaggaaatatttgggttggaacagatgcaggcgtttatgtgtataatcctttattagaagactttacagtatttgatagagttagtgacacaggtgatatgattagtcgtgctgtgactcgtattgaaagtgatgaagatagtgatatatggatttccgtggattatcaaggattgtttcattttgatcgtgtgcaagatcggttaattaattgtctgcatagagataagcgtaagaaccaattggccaatgttacgcgtttttggtttgaggaaaaactatgttgggtcagtttatatgacgacaacctatattatacaaaagataattttaagacattgtttccctttcaggattctgaaggaaaagagccttttaaagatgatatcattaatacttggattatgggtccccataattgttggtatatcggttcttctaatggtttgactgaaattaatctgacaacagggcgggtaaggcgtttgttgaattattatgtgcgtgatttaggctttaaatcggataaggaattatgggtaggtacggagtcggggctatatatttatgatttggaaaaaggtgaaatagctcatctcactgtttcaaacgggaatgattcttatgctttagccgataatgctatttattctatatgccgtgataatgagggaggaatgtggatcggatcttattttggcggggtcaattactatccgcgtcaatggacttattttgaaaaattctaccctcgtgatgatattaaaaattttgggcgtagggtacgtgaattctgtgaaagtaatgatggtactgtttggattggtactgaagataagggattatttcatttttatccggaaagtggaaagattgaaaaattctcacatccttctatttatcaaaatgttcatggtttatgtttggacggtgatgatttgtgggtaggcactttttccggaggtttaagccgtattgatttgcttacgaagcaagtaagacactatcaaaaaggtataagcccaaattctttggatgccaataatgtattctctatttgtaaaactacatctggtgacttatggattggcactacatctggattgctgcgatataatcgtgatacagatgactttactaggatgccggaactagctaatatgtttgtttataaaatattggaggattttaatgggaatttgtggctggcaacttattctaacggtgtttttcgttatgatgtgaataagaaagaatggaagaattttatttttcacaagaacgattccacttcattaccttatgataaagtaatcagtatttgtgaagatagtcgtaagcggttatggtttatgacacaaggggcgggtttttgccgttttaatccggaaaatgaaagctttactcgttttgatatgtcgaaaggttttcctagtaatatcatttatcggatggtagaggataatcgggggaatttatggttgacaactaataatggtttggtttgtttcaatccggaaacagatgataaacgagtttatactacagcaaacggattgctaagtaaccagtttaattatcagtctgggtataaagataagatgggacgtatctatttaggtagtataaatggttttatcacttttgatccatctacttttgtagaaaatacttttgttccaccagttgtcattacagatttcttcttattcaataaacgaatgcagatcggcagtaaggattctccattgaaagaaagcatcgtcttttctgatgaggtcgagttagaatctgatcaaaattctttttcattgcatgcggcggcattaggttatcaggcaccggaaatgaatcaattggtttataaaatggaaggatttgataaagagtggtataatgtagggcggaattcggtaatcaattattccaatttaccatatggaacttatattttccatttaagaggatcgaatagtgacggaaaatggaatgaaaaagagcgtatattgaagattcatattttacctccgttttatttatcagggtgggcctattttatttatttgctattaggaattctgtctgtggtaggtatcatttattatttccggaaaaggaatgagcagaaacaccaacaggccatggagaaattcgaacgggaaaaggaacgcgaactctatactgcaaaaatagatttctttacgaatgtggcgcatgagattcgtactcctttgacattaatcaaaagtccgcttgaaaatgtgcttgtttctccgaatgtatctgcagatatccgtgatgatttggaaataatgaatctgaatactacccgtttactggatttggttaatcagttacttgatttcagaaagactgaaacacgtgggtttcaactgaattttgtagagtgtaatatttcggatatattacagcagatttatatgcggtttactccattggcacggcaaaagaaattggaatttgttattgaatgttcggaatctatctatgcgtcgatagatcgtgaggcgttgactaagataattagtaatctgtttactaatgccattaaatattctgaaacttatattcatgtccggttgtggatggaggatacttgttggttcttgtctgtctgtaacgatggcaatgtaattcctatggaaatgcgtgaagagatttttaagcctttcatacagtataaggacggattttcccgtaaggtttcgggtacgggaattggtttggcattggcaagatctttagctgagttgcatgaagggaacttaattatggatgattcacaaaagcagaattgttttattctttcattgccagtaaagcatgaacatactattgccatttcgaagagtgaggttaagttgaaagaggatccgaaagaagaggatccgggacaattgcaacagaagccgcgttacactgtattgattgtggaggataatgttgaaatgttggcttttgttgtcagacaattgtcacctgtttatcaaatattgactgcaactaacggagtggaggccttaaaggtgttggaggggcatacagtgaacttaatagtatcggatataatgatgcccgaaatggatgggttggaattatgtgaccgtataaaatcagacttggattacagtcatattcctattgtactgttgacggctaagaccactttacaatcaaaaatagatggtttgaaatctggagcggatgcttatattgaaaagccgttttctgtggagtatttgaaagtgtctgttgccaatttattaagtaatcatgaaaagctgcatgcggcttttgcacattcaccgtttatacagaccaattctatggctatgacgaaagcggatgaaacttttttgaaaaccttgaatgaagtgattgttgccaatatgcaaaatccggacttctgtctggacgatatggcgagtttgcttaatatgagccgttccagtttgaaccgcaaaataaaaggagtgttggacatgacccctaatgactatatccgtttagagagattgaaaaaagctgctcaattattaagggaaggagaatgtaaggtaaatgaagtatgttatatggttggcttcaatactccttcttattttactaaatgttttcagaagcaatttggtattttaccaaaagattttgtgaaatgatttttttcggcgcatgaaatagaataatagaactaatcgccctcaggaactattctgagggcgatttttgaatgtattattctattaattggttgaatagttctagcacattcggggagtttggaatacatttgcatcacaaaaagttgagaatatgattcatgtaatactgtgaaaaaagaaatgcctatgacataacaagaatgtgaccttcaaattctatctgttgtatgtatatttatgatacatacttgtgattaattaaaaagcggaactgaaatctccgcacaattttacaaatctaattctataaaaaatgattaaaaaattattagtcttctttctgactatttttacgatgactgcttatgcgcagaacgtaacaatgaccggaaccgtagtagacacagacaacctgcctttaattggtgtgaatgtggttattaagggtacttctaccggtactactactgatttggatggtaagtttactcttactggagaaaatggacaaacattggttttctcatatatagggatgaccctccaagagattgtttacaagggaaaacctttgcacgtgataatgaaggatgattccaaggctttggaagaggtggttataattggttatcagactgtgaagaaatctgatctgacgggtgcagtagcagtagttgataccaaagagatgaaaaaaagctcagctggaacacttgtcagtcagatgcaggggcttgctacaggtgtaaacgttcgtagtagtggtagagcaggtgaggatgcttctattcaaattcgtggtgtgggttcattaagtaataatgctccgttgtgggtggtcgatgggatgataactgatccgggagttgactttaatccggctgacgttgaatctattcagatcttgaaagatgcttccgctgccgctatatatggttctcgtgctgctaatggggtgattattgttactactaagaaaggggtgagtggtcctatgaaggtgaatgtgagtgtgaaagaaacattggaatggagtccgaagtttgatttgatgaatgcggcagagtacattaaatataatgatatagcttataaagaagcgataaaagatggtatagcctccataacaacaactcagaagcattccgaatatgataccaattggcaggatgaggtattgaagacagctttggtacaggattataatgtatctttatccggtggtggagattcgggtagttattttgtttcagctggttactataataatgatggtgtatcttatggaaatacgtttgatcgttatagtttccgtgttaacacacaggggaaaaaaggttggttttcattcggtgagaacttggcctactcattaactaatacagatccgaaccagacaaatacttataatgactttttacgtatgatgcctactattccggtttatgatgagaataatccaggtggttatggatatggagatgcggctaaatataatactttcggtgtaaatcccattgcacgtgaaaatttggaaaaacgccatatgagacaaaatcgtctgaatggttcattgtggttggagttcaaacctttcgagtttctttcttataagttcaatgggggcgttgacttgtatttctatgaaaattcatggtttcgtggtgaaggtaattggcaacaaaatcaggaacatcgtgatccggagagccagaaagcacgtgataatacttataatatgctgattgagcacacgttgaattttaacaaggattttggaaaacatcatgtcgatgcagtattaggtactacttaccaacatcatgagtgggaggggttatgggcttcccgtcttaattttcctatgttaggtaatggtgattatctgacagtgttaaatgctggacaaagtaaccaacagaatactaatagtattagtgagaatgccatgatctcttatttgggacgtgttaattatatttatgatgacaaatattatctgacagctactttccgtcgggatggtacttctcgtttagctaaggaaaatcgctggggtaattttccttctgtttctgctgcctggagaatttctaaggaaagtttctttaaggtaccttggattgatgatttgaagatcaggggaaattgggggcgtttgggtaatgcttctatcggtgattgggattatgttggtactattaatcaaagcattgtgacggtatttggtggagctattgtacctggagccactcaagtaaaattagtgaataccaatcttgtttgggaaaccaaagaaactgtaaatattggttttgacgctagttttctcaattcacgtttgactttcagtgccgagtattatcattcaaagactaaggatgttttgacggaaatgcctattgccatctctaccggtaatcaagaaggggcacctaaagcaaatgcggctagtttgcgcaatcgtggatttgaattgagcttggggtggaaagatcaagtttcagatttcaaatatggtgcattgttgaatattacaactttgagtaataaagtattaagtttaggatatgaaaaaccttttattgattcaggtcaggcaagaacgagattgaatggtccgttggcagaattctttttgtataaaaccgatgggatttttaaaacacaagaacaaatagataattatgtaactcctgatggcgaacctattatgatttccgggaaacgtccgcaattaggtgatgtgaaatatattgatacggataataatggacagattacggcggatgaccgtcaattttgcggaagtccgtgggcaaagatgcaaatgtcattggtcttgaatgctgaatggaaagactttgatttcagtatgatgtggaatgggcaatttggtaataaaatttataatgtatccaaatggcaaggacgtttgttctcggacaattccaattatcttcgcttcaagaagggagaagaaccttatcaggtaaatcagaattctgatacgccacgtataatttatggtgaccaacgtaattcatgggatgcggatcgtttccttgaaaacggttcttatttcagactgaaaaatatttctatcggatacaatcttaaaaaggaatggttgaagaatttgggtattgacaaacttcgtttttatgctaccggtagtaatctgctcacttttacaggctattccgggcttgatcctgattttataaacactaatatttggaatagtggaacggatagtttttcatatcctaatactcgttctgttatgtttggcttggatttgaccttttaacttataaattagtatactgatatgaagaaaatatatagatttttatttgctggtgtcttggctttgtgtgctaccggatgcagctcaagtttattggatatagaaaatccgaatgaagtaaccaatactactttttggaaatcggcggatgatgcaaaagctggagtaaatgcttgttacagtttcttatataaagaagggacttggatgcgttggttgtcttttcgttacgatctgtcatcagatgaaggatggagttcgtctccttggatagaattaggtgactggacgcgttttctttataataattatgatttctatgagggtaataaggtacattgggagcatttttatgtagggatctttcgttgtaatcaggttttggctaatgtgcctgcgattgaaatggatgaggttcaaaagaaccaacttttagcacaggcttcctttttgcgtgctctgtggtattttcagataaatcttttgtgggagaaagggacattagttcttgaacctcaaaatgctgattacatacctaaggacgcttcagaacaggaaatttgggatcagatagaaaaagaccttacgtttgcaatggagaatttgccggaggcatgggatgcggcagatttaggcagagcgacaaaaggtgctgctaaagctttgttgggcaaggcttatatgcaacaacataaatatgatagggccaaagaacagttgcaatggctgattgatagggaaggctctttgtatggtttgcttgataaccgtgaagacaattttaccgatttgaatgaaaataatcaggagggaatatttgaaattcagtttgatgatcaaaataaggggggcacaggcaatgatgccagtatggcctttggtttccagcgtactcagttttatgcacccggtggcactcatggtacgggttggggcgatggtaaagcgcgtcgttggctagtagatgagttcttgaaagagagaagggttgatggcagaaatgacttgcgtttatacaatagtattctttataaacattttggagatgattttcctgatcagtcaaaaaaatactatgccaatgaagatgcgtcacaatggtttgatgagtggggacaggatacagaggattgttatattcgcaaatacaatacttcttactatcgtgaacgtgaagactatttcgcacgtaataattatcgtattatgcggtatgctgatgttttattgagttatgcggagtgtttggttgaaactggaacttcggcttctgatgcggctgtttatgttgataaggtaagagaacgtgcagggttatccaaactgaaagatagtcggtggaaggattgtttaagttcaaaggaggtctttatcaaacgtcttcagatggaacgtgctttggaactttgtttcgaaggctggcgttgggcggatttgaagcgctggggattgcttgattcacaggctggtattgacgagctgaaagctcgtgacaaggacttcaacaattttgtgattggcaaacacaaacgtatgcctatccctacatcggaagttgaaatcagtaagattgatgatgttcctcaactaactcagaatcctaattattaataaaaaagaaagactgtgtcggagtgttttttctttttataatacttccggcatagtctttatttaactagtatcatttatgtttgtctgcaaaaaaatactgatcttctgtgcttttgcttgttgcggtactttattcgcgcaaaacatacagaatccggtgcttcccggagtagcggatgccggtgtgatgaaatataatagtaagtattatataggtggagtatttaccaatggggatttttatgtttccgacgacttggttcattggggtaaacctgttcatgtcgtgactatggataatggctggagtagaggaagtggtgccggtaatgagcagattcacgccaatgatatgttttgtttgaatggtgattttcacttatattggtctgtcaattattggggtaaggataagcatgctgttcacattgtacatgctcaaagtaaaaatgtgttggggccctatatagagcctgataaaaaaacttggatggataatcgcattgatcctaaggtttttaaagatgatgacggacaattatatatgtatatggtgcgttttactgatggaaatactatttggggacgtaaaatgaagaatccggcggaatttgccggagaaccagtgtgcttgtttgcatcattgccggatacatgggagaccatggataacagagtggcagagggaccttgggtgatgaaatacagagaccgatactatttgatgtataatgccaatcatacctctactgagtgggggaattatcaattgggggttgtggaggcagactcacctttaagttttcaaaatgggaataaatatagctatccggtagtaaattctaatcaaattctactggaagagaattatgtggatcttttacgatatggcatcacttatgagccattgtttgattatacagaaaataatcctggagtcggttggatgcttccggtatatcaggcttccgattggaagaaaggagaatgtggattctcatctaaagagataaaaggatctaccactcgtcatttaggtacttggtggacatctccttcattgtggttacgtaaatctttttttgttggcaaacaggtgggaaatttagcactcagggttgctcatgacggagatacaaaaatatatttgaatggaacattgatttacgaaaaacagggacgggattattgtatggtaaaccttgatgaaaagcaacgagagcttctgaaaaaaggagagaacttgcttgctgtagaaacaaataaagggcgtgcccaattttttgatgtttctttgtttgatatgaggagtgaaacagcggatgatattttgatgaccccgggacaacctaatattttaagggggcccaatggatttgaatggtggcttatatatatggctaataaaaataatgagcgtagggggcagtatattaaccgtgttcatttctttaataaaacattatttgttgaaggaataaccggtccttgtacagatggctatcatccggaaccttctttgcccactttttcaatgaaaggggaaacaccttcttttggagtgctgcaacaagtgaaaccttctacaacttatatgtttgaaacagcagtcaaaacagatggagatgctggtatcattgcgtggtggaaagatgtggataataatgcttatatcggtttcgatacaaagaaccacaattggtatttgcgtaccattattaatggtaaagaaaaggaggaatatttcactttgcctaaagattttcgttggggtgtttatcatcatttacgtattgaacgtaatcaggattgtttaaaagtatggttggatgaaataccatctcctcaaaaacatctgtttacaaagattattcctgtgacggaacccggtgttcccggagtatttgatcggactaaaaaagctttgttcgaaggggtgacttatactatcggatttgatgatgaccggatacagttaaaagaacattcagaaatattgaaaggtgattttcttgatcattatgaatttagttttcaactttcaggtttgtccgattgtaagatgtcaggaagctatccggtttatgtggataaagataactatgtaaaagctcaatttaatggtatcacgcgtatgctggaagtggtagttgtaaaacaaggacaacagatacttgataaaaaatatccgttggaacatttacaaatggtttatcctgatgtgaagtatactgattttgtcgaaaaatgttatcgttttatatcgccttcatggataaatgccctttacctgaaccgtcatgaagtagggaataaggcggagtttgtagacgatatgtttagtaaatttacaatagaatatttgaatgagggagaatggtatccattgaataacagcggggcgacggtggcagagcatccggcttataatcgtttgtcttttactccgataaaaacggaaggtattcgttttattaataaagacgctcaggatttggaacggcatatttataagttgggaattcaagaacaattaaaggaatcttataatttccgtgcggtgagaaggagaaataagctctatctttttgttgacggaagagaattagggagattggatattcattatcctgcttcttgtgtaggattttgttctggaaattattctccggtatataaaggaatattgtattatcatataggaaactgactagtattatgaaaaaaaaattgatttttatttggttattgatgttggggacattgacttcttgtcagtcatgttcctcagaatataagaatgtgaatgaaataattgtggaagagctggaaatacctgttccactgggtgacccgtttatattgttgcacaatgggacttattatgcttatggtactcactcggatgaaggaatagaggtttatatctcggataatttaaaaacgtggaaatataaagggctggctttgaataagaaggattcatgggcagaccgttggttttgggcaccggaagtatatgaagtgaatggtaaattttatatgtattattcggcagatgagcatatttgtgtagcagtggcagattcccctgtaggaccatttatacaaaataagcaagaacctatgattgttgaggagaaatgtattgataattcttttttcatggatgatgacggtactccttatttgtcatttgtccgttttaatgatgggaataatgtatggatagccgagttggaaaaagatttgataacccttaagaaagaaacgatgcgcccttgtattcatgtttcacaggcttgggaggaagtgtggcctcgagtcaatgaaggttcttatattctcaaacacaatggaatttattatatgacttattctgcgaatagttatgaaagtccattctatggtgtaggttgtgctacagctaccgatataatgggggaatgggctaaatacgacgaaaatccattattgcaaaatcctggtgggttggtaggtgtagggcatagcgccatgttcactgataaagagggaaaacttcgtattgtattccatgcccacaaagataaaagtaatattcatccgcgtgctatgtatattggtacggtaaattttgagaatgtgaatggaacagaccgtatgagaatcagtaaagaatatataactcctaaattactgcaatgagaaaaaatttgatcctgtctatctgcttttgtttggtgtcttgctcatcatcgtctgcgcaagaagaaatacctgatggtgataaaaccagctattaccggaatccggtgatagattatagtctgcccgatcctactattatagaaggtggtgatggttattattatttgtatgcaaccgaagatattcgtaatttgccgatccatcgttccaaggatttgattaattgggaatgggtaggtacagcattcacggatcgaacgcgtcctgattttgaaccgggtggaggcttatgggctccggatatcaataagataggtgatacgtatgtactttattattctatgtctaaatggggaggtgagtggacctgtggtatcggttgcgctacggcagacaaactttcggggccatttaaagaccatggtctgatgtttcggagtaacgagattaatgtacagaattctattgaccctttctatatagaagatgccggaaagaaatttttgttttggggcagctttcggggcatttatggcattgaattaagtgaggacggtctttcagtaaaacaaggggagaagcctcggcaggtggctggtacagcttatgaaggaacttatattcataaaaaagaaggtttttactatttttttgcttccatagggacttgctgtgaaggattgaatagcacttacactactgtagttgctcgttcagaaaatttgtttggaccttatgttgataagaacgggaggacaatgatggataaccaacatgaagtgttgattcataagaatagttcgtttgtgggaacaggacacaattcggagattgtgactgataaagtgggtaatgattgggtattttatcatgcagtggccacaaagcatcctgaagggcgtgttttgatgatggataaaataagttggaaagacggatggcctgtggtagctacggattctccctcattgaaatcggaaaaacctgtattgtaattaataaatacataaaaatatgaattggaaaaactttgtatgtagtgtggtgtgtctggcaggaatgacttgtgcggaagctgtgaactatacaccggaaaatgtttcggcttccattgctttgaaagtgcctggtaatgatgcgaagcggtatccgctgactttgcagcaattggataatagtaattttgaatatcagtgggtggcggccgataaattacctgtggtgatttatcagaatgttgaagaaaaagacggcaaccagcgtattgtcatttttatgactgcattggatgatgtttatttcaattttggtgagcaggtaatgactggttgtcatcatgatgattgtttgttttatatgcctggattttggtatcgtcgtaacttgcgttctcctcaagaagcgccgtcttttcatacctcggatagctggttggttcgtgaagaccgtttaagtactcccttgactgctatttttgataaaaagaataggaaaacatattctgttatccggctggataatatggcttcggatgctttgactacccataaggaaggggaagtgatattgtctggtaaaacctctataggttatacaggatttgaaaacctctcgggtatcgcttctttgtcttttgggtttccttacaaggaagctcctaaaacttatattcgtaaattgacattggctccttcggttgaggcctatcaattattacgtaaaggtgagagtctttctctgacttgggaattacatgagtcggaaattgctgatttttcagaatgtgtgcagcatatttgggaatattcttatgatacaaactgtcctcaaattgtaaatacaccttattctcctgagaaaatgaaggaagtgatgagtaatttcttcgtggaaagctttgtcggaaatactcctactcattattattcgggggtggaattgcgtacggctacttgtgaccaaacggatgttgccgaagtgggttttgtgggacgtactttgttgaatgcttttaatgcattggaatatggagaacagcagcgtcgtacggatttggtgacgaatgcttataaaatttttgattcttatttgcagaatggattttcggaaacgggtttctttaatgaagtagtacattataggcgtaattttgtagagtctgttcatagtatccgccgtcagtctgaaggggtatatgccctgcttcattttttgaattacgaaagactgcaaggtcgtaaacatcctgagtgggaaaagcgtataaaaagtatgttggatatgtttctgcgtttacaaaataaggacggtagttttcctcgtaagtttaaagatgacttttctattgtagacaagagtgggggaagtaccccttcggcaactttgccattggttatgggatataaatattttaaggataaacggtatttggcaagtgcaaaacatacggtggagtatttggaaaaggaattgatttcgaagtccgattatttttcttctactttggatgctaattgcgaggataaagaggcatctttgtatgcgtcaactgccgcttactatctggctttagctacaaaaggagctgaacgagcccattatgctgggttggcgaggaaggcagcttattttgcattgtcatggtactatacatgggatgttccttttgcccccggtcagatgttgggtgatttagagttgaaaactagaggttggggaaatgtttctgtagaaaacaaccatattgatgtctttatctttgatttcgctgacgtattgaactggttggcaaaagaatataatgaaaagcgtttttcggatttttctcaggtaatcagtacatcaatgcgtcagttgttaccctatgaagggcatcgatgtggtattgccaaaacaggatattatccggaggttgtccagcatactaactgggactacggtaagaatggtaaaggctattataatgatatttttgctccgggatggacagtggcttcattgtgggaattattttctccgggacgtgccgagaagttcttgaaaaaatagtttgaaaattgataatttattatgatgttaagtgattagcatttcatttaaaacttgattttcttttcttttgtagggaaaggtatgtcctttttcagaaaatcagctttctctttaaggaaggatacctgaagtatattaaaaagccggggattgtctttacagatgttcccggcataattttttaccgtcactggcattattgttctgactttacatctcttattgagtaaaacaagtaaaagaaagaatttctctatgttaagataacagtttactttaaattcttaactttgttccccttgaaaaatgattgttacaagataatttaacagctaaaatgcaacaatataaaagaccggaagctataaaacgtatgaatgagttggcgggtagccggaagcctttcctttttattatagattataaacagcagtgttctttgatagaggaaataagccggattgattctacccgttgccgttataactttaatggagtgaaaaatgtggatactgtaacagaaagttacagtgggcggatagactggaactttgttccaatgtctttggcagactaccggcaggcttttgaaatcgtaaaacggaatattctggcaggtaacagctatctcgctaatttgacttgcaaagttcctgtcagtactaatcttactttggaggatgtgttccggtactccaaagcgctttatagactttggttgaaagataaattggtctgtttctcacccgaaatttttgttcgtatagaagatggcgagataaaatctttccccatgaaaggaacgattgacgctaccttacctgatgcggaaaaactgttgatggatgatcctaaagaaactgccgaacatgctactattgtagatctgattcgtaatgatttgagtatggtggcggaacaggtgagagttgtccggtatcgttattgtgaccggcttgaaaccaataaggggcctatctttcagacaagctccgaaatatgtggtgtcttgcccgatgattacccgtcgcatataggagatattatatttcgtttgttaccggccggttccataactggagcgcccaaatccaagacgatagatattattgaagaagcggagagttatgagcgtggattttatacgggtataatgggctattgtgacggcaggactttagacagtgcggtgatgatccgttttttagaacaggaaggagagaatctttattataaggcggggggaggaatcacttcaaagagtgatttacaaagtgaatataatgaaatgatacagaagatttatgtacccatttattgaaactatacggatagaacaaggaaaagcgtgtaatttgtcttatcataatgaaagactgaacaatacccttcatcatttctggccagactgtgccggcatagaattaggtgaatacctgaaattgacaccggagatgagcggaatgaaatgtagggtgatttatgatggcggtggaataaaagaaattagttatgaagcctatcagatgcgtccggtacattctttgcagttggtttattcggatgatatagattatacttataaaagtacagacagggaagctttaaaccggctttttgcctgccgtggagaacgggatgatattttaattgtcagacgcggactgctgactgatacttccatagctaatattgccttgtttgatggtaaggattggtttacacctaaattacctttgttgagaggaacttgccgtacagcattgattgacagcggaattataaaagaaaaaaatatccggccggaagaactatcttcttattcttttgttaggttatttaacgctatgattaaatggggagcgttggaactttctaccggaaccatttatgaataataagaaagaaggtggaattttgaagatttttgtttgtttccttaaataatttgctatatttgcaaaaaaaatataaatacaggtagggtatgagattgcggacagttgccaagttgggtatggtgctatcagtggtattgttttgtacggctgtgggcttttacggctttgctaaattaagcctgacggataagagtcgtgagatcaatctcttctcacttgtaccggctgattgcatcggtgtgttggagagtgataatattaattattttctgaatgaatttcctcaactgaattattctgaagaattgggtaatttccagtttcccggtttatttaattatgtgttgggaggtttgaacgaatataccactaatactgctcatggtctgagcagtaagatgagccgggtggtggtcagtttccattctccgggtactccgcgtgaccaggtggtatatttccgtatgggggctgatgataaggaaacattgggagatatgttgttagagagaactccgggaagtttttcacctaaaaaagaaaaatacagaggaaaaaatatagcagtctatccgttgggcaataatgattttctagctgtctatagtgaggcggggttctatgtggtgagttatcagaaaagtttgatagagaaagtgattgatgcgcgtgaggatgaggagaaagcattgagcaatgatcccgtgtttgccaaagcgatgcagaaaaagaaaacgcataatttcctgactttatacggacgtacaccgtctatgcctttcctgcaggataatagtagctgttggagtgagtttgattttcacatgaacagcgatgtggtgtatctcactggagatacttttatgcctgattcatgcggttgtgtgaaccagatggccgaaaaattgaaaaatattccagatataagggaagatagtttgattatttctgctgataaagattccatggcagattatatggaagaggcatacgaaagaaatagcaggacattgttcaatgaatgtgtagctaatctttcacgtgacgcagcctttatgcttgtggcggacatgaacaagatttcccgcaacccggaacgtttcgagccttatttgccggcatttctgttggaaaatgctcctttattccattcgtttattctttcaacccaattgtcagttgtaaacgatcggctttcccatatcatggtgctgacatataaagattagcgcaacttatgttggtggaagtgaggggccactttgcttctaaaataaaataacgagataacagtgagtgcagctccgaatagataagccatcttgaaggtggctatttctgctatatatccgcccaataacatgccggcgcctatacctacatcccacgaagtcaagtaggtgctagttgccgtaccacgctggttgttgggggccaagttcacaaacagcgtgttataggcaggaaacatggttccgaacccaatacctagtaaaagagctatggtgaacagaaaataagtggtccattgcagactccatgttgtcagccatccgcatgaactcaaaccgaagaaacagaagcagaccagatacaggccggcttcaataacttgagtaaccattccccggtctaccaggcgtccggagaaaagacgggaaactgccattcccaatgccataaaggtgaaaaagaaaccggtagatgcctggatacctatttgtttggcatacattgcaacgtaattggtggtcatgccataagggatggatagtaataacaaactgaaacctgccggtattcctttaagcaaaatgaaacggtccaatgatataggttctcgttttacaggaggtttgtaggtggtctttaccaatgaggcgcagagaaatcctatcaggcaggaacctaatgagcaacagaagataagcgtatagtctgctcctgcatcatgcaggaagagtccggtcatcggtccgatggacatggctatattgtttgccagcccataatatcctaatccttccccacggcgtgaagaaggcatgatatcaatgacaatggtatttccgctgactgtcaccatgccgaacgatactccgtgtataatgcggaataaaataaataaggtgagtgttcctgcaatgagatatcctccgaagatggcggtaaaagtgaaataagccaacagataaagcggtttgcgggcaaaggtatctaacagataaccggagaaaggccgtatgcacagggcggcaatggtgtaacaggaaagtacggcccctatggttgttttgttggcgtcaaaaacttccgccaagtagaaaggtaatacaggcatcagtaaccagaatccaaagaataatagaaaattggctgccagtatttctatataatttttggtaatcagcttgtccttcatgagcaataatgtgctaatatgtcaatgtatcaatatgctaatgtggcaatatgttaatatgccaattgaccgcgttctattccgcatggcaattggcatatcagcacatggtcacattgacactattaattggctgcttcgaattctttcaagaagcgagtatcgttttcagagaataatcgtaaatcgtttacacgatatttcaagttggtgatgcgttcaatacccatacctagcgcatagcctgagtaaactttgctgtcaatgccgttggcttccaatacattcggatccaccataccacatcccagaatttccacccagcctgtgcctttacagaacggacaaccttttccgccgcaaatattgcaactgatatccatttcggcacttggttcggtgaacgggaaataggacggacgcaaacggatttgagtatcttcgccgaacatttctttggcaaacaatagcaatacctgctttaaatcagtgaatgatacattcttgtcaatgtagagtgcttccacttgatggaagaatgcatgggcacgataactgatcgcttcattgcggtatacacgtcccggacagatgatgcggataggaggttgcgaatgttccatagctcttgcctgtacggaagaagtgtgagtgcgaagcacgatgttctttttcacatcttcctgattggcttcgatgaagaaagtatcttgcatatcacgtgcaggatggtcttcggcaaaattcatggcagtgaatacgtgcaagtcgtcttctatttcgggaccgtcggcaatgctgaagcccagtcgatggaatatatcaataatttcattttttacaatgctcagcgggtggcgtgttcccagttcgatgggataagccgtacgcgtaagatccatttcggcggcaccgttatcttgggtttcaaaaacttctttcaatgtagcgatacgttcctgagccttgtttttcagctcgttcagtttcatgcccacctcttttttctgctcggcaggtacgttgcggaagtctgccatcaactcattaatcgctccttttttgctaagatatttaatgcgcaaggcttccaattcttccgcattggctgcttgcaagccttcaatttcctgaagtaattgttctattttagctaacatagtttcttctttattttttaatgaccgcaaagttagcgaattaaacccatatattttgctgaaaactaaaaaaaacgatatttttgcatcgattttttctaaatatagaaaatgagaaaactaataatcggagtttgtctgcttatgctgataagctcctgtggaggtggaaaaaagaaaatggaccccttcgagacgcttactgaggagattgattcgctgactgcacccccggacacaacagaagcgatggctgcggtagaggaagaaccaatggttcccgctacggccgacgaaagttttgccgactttttctacaattttgccagtgatgaaaagttacaattgtcacgcatcgtgttccctttgccgtattatacaatggaaaagaaagagcacattgaaaaggaccaatggaaacacgatcctttattcagccggcaagatgcctatacagttctgttcgataaggcggaagatatggaaatggagaaagatacggggcttaccagtgtcaagatagaatggatttacttgaagaagggaaaaatcaagcggtactattttgagcgtctgaaggggctgtggaaactggaagccatagatttcgcggatatgccgagagaggataccggtaaggaggacttctttgagttttatgaacgttttgccaatgattctgttttccagttgtcacgtttgcacgaaccgttgaagtttgtgactgctgatcccgaagacgagtttcagatactggaaacgactttggaggccggacaatggttcgcattccagcctgtgttgcctcgtgagaatttgacaaatgtgaactatggccagaacgagaatgtgcattccaatacgaaagtgattgaaatgaaaggttttggcaatggatttaataatacgctctattttgaacggcggcacggtctatggaaactgatgcagtttgaggatctgagcgattgatttgattgtaaatgaaggaaataaaagactattctctgttgcctcataatacatttggtatggatgtgaaggcatctttgtttgtggaatatgaatcggtgacagagctgcaatccatcttgtcggataaaaacctgatggccggtaactggttgcatatcggcggaggaagcaatttgctttttaaaggtgattatgcagggactgtcctgcattcggctatccgggggtatgaggtggttgctgaaaacgaacaggaaatagaggtaagggcaggagccggtgagatgtgggatgattttgtggcatataccgtgaagaacagttggtatggtgctgaaaatctgtcattgattcccggtgaagtgggtgcctctgccgttcagaatatcggtgcgtatggtgttgaggcaaaagatttgattgtaagtgtggaaaccgtcgaggtggaaaccggcaggaaacggatttttaccaaagaggaatgccgttatgcttatcgtgaaagcattttcaagaaagatttgaaaggtaaatatatagtgacttacgtcacttatcgtttaagtaagcagccggtttttaatctggagtatggaaatgtgcgtggcgaattggaaaagcgaggaggtgaggtggcattggagaatgtaaggaaggtgattattgccgtgcgtgaagccaagttgcccgatccccgggtgcagggaaatgccggaagtttctttatgaatccgattgttccacgcaggcagtttgaaatagtacagcaacagtatcctgatatgccacattatgaagtggatggcaatcgggtgaagattcctgctgcatggatgatagaccgttgcggctggaaaggcaaacaaatagggcgcgcgggtgttcattctaaacaggcgttggtcttggtgaactgtggaggcgctacgggagatgaagtgattgctcttgccagacggatacaggagtctgtgcttcaaaagttcggggtagctatctctcccgaagtgaattttatataaagtataatatgaagattacaatactaggcagcggaacgtctacgggagtacccgaaatagggtgcaaatgtctggtatgtaccagcagcgatccccgggacaaccgtttgcgttgttcgggactgatagaaacggaagggctccggattctgatagattgtggtcccgatttccgtgaacagatgatacggttgaacgatttcaaaccgttggacggtgttttgattactcacgaacactatgaccatgtaggaggcttggatgatttgcgtcctttctgtcgttttcgtgatgtgccggtttatgccgaacaatatacagcagagcgtttacgccagcgtattccttattgttttgccgaacatctttatccgggagttccccgtattacattagaggaaattgttcccggttctccttttattatcggcaatcccgaaggaaacaaagtagaagtgacacctcttcgggtaatgcatggcaaattgcccattttgggataccgtatcggcaagatggcatggattaccgatatgctgacgatgcccggggctgaatatgatttgttgcaaggactggatgtgttggtaatgaatgcattgcgtccccagcctcaccatacccaccagaatttgaaggaggctttggacaatgcacaaagaataggagccggggaaacttattttattcacatgagtcatcatatgggattacatgctgatgctgaacggttattgccgccgcatgtgcattttgcatacgatggaatgagaattagtttataaagccggtttcaacgaataccggcacaatccgttcaatccgcattccgaacatttcggtgtccgtgccatacaaacatatcttccgtgtaaaataagccaatgatgtgcggtgggcacaatctccttcggaatatacttcatcagatatttctcggtagccagcggtgtggtgcaggtttgaggaaccagtccgatgcggtggctcacgcggaacacatgtgtatctactgccatggccgctttgttgaatactacactttgaatgacattagccgtcttgcgtcccactcccggcagtttaatcagttcttccaatgttcccggtacttcgctatgaaaatccttcaccagcatttgcgccatgcctactagatgttttgccttgttgttgggataacttacactccgtatgtattcataaatcacttccggcgtcgaagcggccagtgcctcaggagtcgggaaatcccggtaaagaggaggggtgatcatatttacccgtttgtccgtgcattgtgcactcaggataacggctatcaacaactcgaatgggttattgtaatgaagttcagtttcggcaacaggtatcgtttcttgaaaataagcgatcaccttgttataaagttcttgttttttcatattaccttcttttttcggttgcaaatataattgataaatcaataaggtagaattattcgggcaattcatttgtttagttgagtaaacttcttatatttgcataaatatattagatttatgcagcttaacgtaaagaatgaaacttctacattgaaagctgtggtgcttggacaacccggttccatagggaaggtccccacgctggaagaaacttatgacgccaagtcatacgagtccgtattgcataacatatatccccatgaagaagatattttcaaagagatgagatgctttgaaagcgtattgttgaaatatggggtacaggtctatcgcccgtggacactggagaattgtaatcaggtgtttgcccgtgatgtggggtttgtgattgacgacaagattattgtttccaacatcatccccaacagggaagatgagaaggaagcttacgaagtggtctataatcagatagcttataacaagattttcaaccttcccgaaaaggcgcacgtagagggaggtgatgtggtgctttacaataatattgtgtttgtaggcctttatacccagcccgattatccgcagatgaagacggcacgtaccaaccgatatgctttttcctttctgaaagaaatctgtccggggaagatattcatccccttggagctgaaaaaacataatacagatccacgtgcggggattctgcatctggattgtacctttatgccggtagggaaagggcatgcgattatttataaggacggatttatgtatcctcaggattatcatactctgctcgatttgttcggcagggagaatgtatttgaaataacgcgggaagagatgtactatatgaatacgaatgtcttttccatctctcctgaggtggtggtttctgaaaagaactttatccgcctgaatacctttatggaagaggtatggggaatgacggtagagcgtgtaccttattatgaaatatctaagatgggcggactgttgcgctgctccaccttaccattaatccgagaaaatgactaaacaaacaacaaaccacattttgatggtggaacccgtagccttcgggttcaatgaagaaacagcggccaacaattatttccagcagcggacagttgcggcaggtgagacagtacaagcttgtgccttgaaggaatttcggggcatggtggataagttgcgtgcaaacagcatagaggtaatagtggtgcaggataccccgatacctcatactccggattccatatttccgaacaactgggtgtcctttcacgacgacggaacggtggtgctgtatcctatgtttgcggaaaaccgcagggcggaaagacgggcggatatcttgcagcggatagagtcggaggggttcagcatccgtcggaaggtagattatacaggttttgaggaagaaaaccgcttcctggaggggaccgggggaatcattctggaccgagtgaaccgttatgcatacgcggctttgtcgcaacgggtggacgaagcattattgggtcggttctgcaaggaacagaactttattccagtgccctttcgcgcctatcagactgtaaacggacaacgtctgcccatttatcataccaacgtcatgatgtgtgtggcaacagattatgcggtcgtttgtctggacagcattgatgacgtggaagagcgtgagcaggtttgccacatcttgcggcagacagggaaagaaatcatcgccatctccgaggaacagatgcatcactttgccggaaatatgcttcaggtggagaacgggaaaggtgcattgtttctagtgatgtctcaaagtgcttacgattcgttggatgaaggccagttacaacggctgtctaagtataacgcgttgcttcccatgcccatccctaccattgaaacgctgggaggaggaagtgcccgttgcatgatggcggaaatattcttgaagaaagaaaaacattaaataataaaaagcttatggatgcaaaattatcggcagctcaattaatggagcttgagaacaaacatggagcacacaattatcatcctgttcctgtggtattggataaaggagaaggtgtgtttgtatgggatgtggaaggaaagaaatattatgatttcctttccgcttattcggcggtgaaccaaggacattgtcatccgcgtattattgatacgttggtaaaacaggcgcgaaagctgactttgacttcacgcgctttttataacagccagttgggacggtatgaagaatttgtcacccgttatttcggatatgacaaggttttaccgatgaatacgggagccgaggcggtagaaaccgcattgaagctttgccgcaaatgggcgtatgaagtaaaaaagcttcccaaggatacggcggaaatcgttgtatgccggaataattttcatgggcgtactaccactatcgtttctttctccattgatccggacgcttacaataactacggaccttttactcccggctttgttgtgattccttacaatgatgccgaagcgctggcgaaagtgctggacgaacatccccatgtggccggattcctggttgagcccattcagggagaagcaggtgcttatgtacccgatgagggatatttgaaaaaatgttacgacttgtgtcgtgcccacaatgtactttttatagccgatgaagtgcagaccggcattgcccgtacaggcaaattgctggcttgtgactatgagaatgttcatccggatatcctgattttgggaaaggctttatcgggtggggcctgtcctgtttctgcagtattatcatgcaatgaagtgatggatgttatccgtccgggacaacatggttccacttttggcggaaatcctattgctgcggcagtggctgttacggcgctggaggtggtacgggacgaacagttggcggacagggcatacagactgggattgatattccgggaagagatgagaaaactgtgtgaaacatctcgtgtggcttcttttgtccggggcaagggattgttgaatgcgttgataatcaataatgatgaaacgaaggatttggcgtgggaaatttgcttgaaattggccgaaaacggcttgctggccaaaccgacacatacgaatattattcgttttgctccgccattggtgattacagaggaacagttaaaggagtgtatcgaaattataaagaagacgattgccctgtttgaataaaggattttttatcctgtcttttaggggtggattcaatctgcccctctaatcgttttcactgatacccacctgtttatgacgcttcatctttcactgttccatactgtttggcaatcaaggaagtatagaaaaagtaattatttgatgaggctgttcttcttgataagaatatttaatgcagttatatccggttaactcggaaataatttctatctttgcaccccgaattaaaaaatagacgtatgatgccgtgaatagcggtcgtgtattctagaacaccacgtaaaaaacaggagaaatgaagaataataacactgtatctgtatcgttcatgttgcttggcatactgttttgtgtatgtcttgtcgcagcaaatttattggagaccaaagtagtccagatctggaaaattacggcaactgccggattggttgtatttcctatctcttacattatcaatgattgtatagccgaagtatggggcttccgcaaggcacgtcttatcatctggatgggctttgccatgaatttcatggtggtagctttggggcagcttgccattctgatgcccgcagctccgttttgggaaggagaggagggcttcaacttcgttttcggcatggcgccccgcatcgctgtagccagtctgaccgctttcttggtcggctcttttctgaatgcctatgtcatgagtaaaatgaagctggcctcggggggaaagaacttttcacttcgtgctatcacttctaccttggtgggtgagagtgccgattccatgattttctttcctgttgccttcggaggtttgatgcctgccggtgaactgataaagatgatggttattcaggcggtgctcaagacactctatgaaattattatcctgcctgttaccatccgtgtggtaaattacatcaagaaggtggatggcagtgatgtctttgatgagcatatctcatacaatgtattaaaaatcaaagaactttaataagttgctgatgtgtcagtgtgccggttagccaattaccatgcggtatatggcgcagcatatccacatagcgcggcaattggcacattagtaaattgaaaaattatcaacaatgaataaaagtgacgcattggttgtgttcagcggagggcaggactcaaccacgtgcctgttttgggcaaaaaaacatttccgcaaagtgtatgctttaagttttatctatggacaaaagcatgtgaaggaagtggagctggcccgtgctattgccggaaaggcaggtgtggagtttaaagcgatggatgtttcctttataggcaacctgggtaaaaattcgctgacagatactacgataacgatggatgaggtgaagcctgccgatagtttccctaatacgtttgtgccggggcggaatttgttctttctgagcattgcagctgtctatgcacgcgaattggggatcaatcatatcgtgaccggtgtgtcgcagacagacttcagcggttatcctgattgccgggatgcttttatcaagtcactgaatgtgacgttgaaccttgccatggacgagcagttcgtgcttcacactccgctgatgtggattgataaagcggaaacatgggcgttggcggacgaattgggcgtgctcgatttgatccggcatgaaacgttgacttgctataatggcgtacagggagatggctgcggtcattgcccggcctgtaagctccgtcgtgaaggattggaaaagtatctggagataaaggcggaaagagagaaacgataggataaatgaatgtgttttctccttgtatgaaaggtgttttctttttgccgagtatattgtttcactttagtgagcaggttttatcactagagtgaagaaatttcatcactttagtggtacaacttcatcactctagtgaaacgatctgctcgaagcggggagagaatttcttttctaaggtatgatagagaaaacatgaatatgaaaaaaataactttaatggaaagaaaagatgaattgacccttctcggggcgaagaccgagtacaggcaggattatgctcccgaagtgttggagtcctttgtgaacaaacatcccggaaacgactattgggtacgttttaactgtcccgaatttaccagcctgtgtcctattacaggacagcccgattttgcggaaatccgtatctcctacctgcctgatgtgaaaatggtggagagcaagagcttgaagctgtatttgtttagtttccgtaatcatggcgattttcatgaagattgcgtgaatatcatcatgaaagatttgattaagctgatggatcctaaatatattgaggtgacgggcatttttactccgcgcggtggtatttccatttatccgtattgtaattacggccgtccgggtactaagtatgaggaattggcggagtatcggatgcgtaatcacgatttatagttgtatctcttggaatgaatagagagattgtggactcaaatatttgctggttctgaaaatttgttctatttttgcactccgaaaaaaggagaggtgctcgagtggttgaagaggcacgcctggaaagcgtgtataccccaaaagggtatccggggttcgaatccccgtctctccgcaataaacgctgaaaatcagcaaattgtaaaatgaacacccgattttacacccaagaatgtaaaatcgggtgtttttgtattatttaagaaaactgccgagcgactatgcattgatcagtgattctttcggatcagtccgaaaaccctgtggacataatattttgaaaaaattccaatattgcaatgtaagaatacagattcttttaaggcattataaattaagtatgtcagacaaccgcttgattgggtaccagtattataactcatcgtttacgattaatcacccacatggttttcggactgacccattctttccatttccaattaccttatgaagtcatgaaacaatatcatacacaaagccattcccgaacattccgacgcgaatcctgccacagcaaacggcaatgcgaacatcactgctactgtaacggcaatccaagttatgattactttgcgactttccatagcagtatacaattattagcggtaaaatccgtatgtgaacctaattgtttgaactcgttcatatcctgtttccgtaaaagattaagtatttccaaatattgcttttgacatattgaagattatgatgtccgggcgatatatgatgctcgacgcagattccatgtgatattaatttcttggacaatgattccaccgcattgttgaaaccaccctcatcttcatcccctgcatcaagaaaccactcttgcttttgatgtagcttttcaaatcgctcgaactccagaggattgtttttatgaaaactgtgttcgttcccataatagggaatatccgatagggcaagttcagtttctatagcaggcatatgtccacctatcctggaaaatagttcggggtattttaagccgtaatggattgctgcaaatcctccggcagaacaccctcctacatatcttccctttcgagaggctattgtattgaaattcccatcaatatatggaataatttcttggataaaataatcctcatatctaccgacatctatcacattattacctatcttttcctgacgtgcaatcttggctgagttcagaccacggctattatccattcgtggacaaacgattatcatcggttctattttggatgcggcaatcagtgaatctgtcaattgtgccaaacctaactgctcaataaaagactcatcaccacttcttctatgcagaaaatacaatacagggaatttactgccatatttatattcatcaggaagatagaccgcgagtgccatctgcttgtttaggtaggtactgtcgtatgaaatatgtcgaatttcactcattattccagcgtttaaccattatataatcatgttctctttcttccaatatttcaaaaccggctttaagatacattcccacagcataattggatttatcgactgacaatgagactgttccatatcctattttatgaatagcatccaataaggaagaaagaagccttgtgccaatgccttttcctcggtattcgggatatacggagattgcaaattcaggcgttgtgtcatcaatcttgccgtatgaacagccgagcctcgaccatgccgccccgacaatcagaccgtcaacgacagccaccagacatatgtcatccggcaatttgccgaaatcttttacatacgcccatatcatgggttgttgcaatactgtacgaggcactttctgacttcctgccggctgatatatggcttcataaaggaattctgtcaagagcattgcttcgtctgattcaattgtgcgtattgtaatattattctggtattccatttcaatacaattccatgtttcaccaagacatctgtaactctcagtttcttgtctgccaacacgatggaatccaaccgattcataacaacgtattgcagccggattgttttcaaacacgcccaatgacacttttgtggcttcgagtttgcagaatgcataatcaaccgccatgctgacaagagtttttcccaatcctttgccacgctttgagtcatcaacaataacaaaaccaagacgttgttcggataaatcatctgccggagtgcgtagagtaatatacccgacaatctcttcaccgtcaaccatagtcagagcaatagagttatgtccgtcaatgtattgctgatgataagagttcatatcatctggagtgacgggataacgctcatatcggtcagcgcaccattggcgcataagatattcgcttttaagccaagtagtgattatattggcatcagctgatttgtatggtcgtagctgtagattcattcgtgctttgcaatggggattcttagaaccgtcttcatcttatcgggactggttttcctcggatcggaaagatatatctcgtgatgacgacgggaggaattaatatccttgatataaccacctgtttttataaatcggtcaatcacggcaagtgttgcaggctcggtatcatacgccccgatgtgcatactctgtacgcatagaccttcctcaaaagtcatgaggaaaagggcggaacagtcaagtcttttctttttcagcacctctgctttcgcccattcaacatcattgttgtcaacaaaatcagggacacgtatcattgctgtccatttgaaggcggatttgtgggtaaaatcatctatggcattgtctgtccaccacaagccttcaagcggcggcacaacatattcaaagaacccgtcaatatggtaatcggtcttataactcatctttatggcataagccaccggatatagcatgccaagagccttctgatattcgccgtcagggtcattggggttgcctgcaccatttacagcgatgaatttcatgacaggcacatcaacgactgccggtgtggattcaggcatatataaagctttatactcttttttatagtcaaatgccatttctaatgttcctttccaatatagttgcgtttgatttcgtctatcgacttgccgcctatgccgaagttctcatctggcaattccttgatggtgacggtgaagaactgttccgggatatgggttatctcggcggctgttgctgtcagtcgttcgataagttctttcttttgctcggaggtcaatgctccgctctcaactgatatgtatggcataatatcacaaatattttatattggggtcatcattttatttcggtcgctttacgaagcaggatacattctgcaggtgtggccccattcagtctgactaccgaatcgttttgaagatctattgtggatatatccggtagaatcctgcgcaaggcgtcttcgaccgccatgtcgtcgcaagccatctcggtcattgctccgtcgccaaaagtgattgaatcacctgtaatggtgtaaggccccgagattgtgttgcagtttgtctggatgaaatatgtgctgtcttcaaaaatgatatattggcgaagactgtgcatagtttcgtccgggcggacataatccgaatcattgaagactatgttttctatgtaccattgtccccgaatgtctgcatccgccattgttttcaaagttgtgctttctgcgacatcggcactgttctttttattaccagaacatcctgttgcgattactcccgataaaattgcgatagcaatgaatgatttaatctgcagtttcattgatttttttcttttcgtatagttaattatatgttttcgattgaaatatgacataatctcacgaatttaatttagacataattgaagccatattctgaccgaggttgcgcatattggcaataccttcgtcatcgttaagtacatcgccgatttctcgcccatataccatattccaataagtcgagcctatgacaatcatttctttattgagaaagaaatgattcatggtatcaacggatgtcatgcctccggcacggcgcacagcggcaaccgccacgcctactttatgtttaagaattccggggttagtggctgctacaacaccacccctgtccaacaatgctttcatccgggatgaaacatcggctgaatagaccgaagagccgagtattattccgtcggcttccaccattttactgaatacctcggcaaaaccatctttacggaacacacagttgtccttgcctttgcaggcgaagcaagcacggcacggctctatatcgacatctgccaactgaataagctcggtttcaacacctttcttattcagttcctcaaatattgtgcggattaagattgccgtattgccatttttccgtgcgctaccgttaataccgattactttcattccagaaatgattttaacgaatcgttggcaaacattgtcggagaaaacttcactatctgataatcggcgatgccgttgatgtagaacggatcttcggaaataatagcatcaaccgcttcacggttgttggcttttatcattatcacgccaccaatgcgagggatctgtggcccagatgttatgaaatctccgatggcataatgtttggcgagatattcacggtgcgcactcagatagttatcaacctcgctcaacggctttttgtatgtgagaattgcaataaacataacgagtctattttttccagcgtttaaggtgagggaagaattgacgcatcatgtctttagcctgttcctgtgtcaagttctgtcctgactgcttgtttatctcatcagtgaattgggcgcagtggtcaatcatctgctccatagtcatatcctgcgcaaacttgccatctttgtagcagtagatgcaataatcttcattgagtgtgccatcggtattcgtaccgaggatttcgtttgttagcggcataccgcagctttgacagaatttttgttccatatcgtttttctttttgcccatcagtccaacagggcaggttattaaaatacaaaagcgcggactgcaatgccacttctttattcggaggtcgtaggaaaccttgcatacagatgtagtaatagcagcccacgctatatgcgtgagaaccactatgccatctgagtatgcaatttgaaaatttcctacgtttccaaatacttgatgagcataacgcttcttttttcttatgtattggaaagagttgctccctatccgaatgcaaaattagttattttattgatgttttgcattatatagaacggaattataacttgaatcctctactttttcttggttcttccgctgattgtcgtaaaccttgccgaagtttctcccattgctctttgaaccattcgcctatcggttgcctgtttattgtaagcaccagtttattattatcaaccgaacttttctcaatcttgaaaatatcattcttgatttcaaatcttcgcctatgctcttcagaatagatttttccattgcatctgattgcttccttttttgtcaaaagactgtttaccatatctttggtaaatccgatggcatagcagagtttttccattctcaacatctctttgagtaaagggaaccagttgaacgccttttcaagaatggtattcaatcgtgatatttccttgtctttggcttcaagctcttgattatgcactccttgaagattacgaatctgtttgccatgctgttcctgcatctgttgcatacggacttttaaatcgtcaatgcttttgttccgtttggcaatctcctgatgcagttccacattgctatgctccagctctttcagttttccgctgccgaaaagagaacctacaccgcttgctatggctgtggcagcatcggtggctgcgcttttgagcttgtcggtgcgtatctccgattttacctgtttgagttcctgttcggcaagttccacctgttgttctttatgccgctttgcagcatctatgcgttgcagttcggctttctgtttttcaatgatgaagtcattgcgttccagatgttctttgccagtaacattttttgattgcccacgttccatcattagaatgtctgatgccaaagtctgcatttttgccatatcctcgtcattgagtttacggctctttcctgtatcgtggttcatccagtcaaaaacaatatgggcatgataattcggcttaaaccatttttcacccacttgaaaactctctttgtcttctgcgtcaggtttttcacccagccaatgtccttcgtccttatgcaggaatatttggagtggcgtgatgccccagcgtctttggcactcttcgccaaattcacgcacatctgccaatgtggtgtccgctctgatgagcaacactccctcacggataggtgaacatcctgccaccttgattattttaccattctttcctttgcgttcccgttctttttcctgcatggcacgtccggtcttttccttgaccatccgtttgatattgtcatagtgcgtttgcagctcgggagtgccgaagttcgggtttatccattgttcgttgtcggcagaaagttcggacacaacatagattttggacaccccgatgtttcgtatatactcgtcagtccttcggttatgcgcctcactcgatgcgatgttgcaaggctttatgtgtatgcttgattttgttgccatagcttctttttttgtttacattagattactttgtccgcttccgtaacggggttcttaggggtaacccataagcggagattgcaaagagagggtcactctttgctcggggttctcaggggtgaaacgccctgagtgggtcattagggcaaagccctaatcccctcgggagagcccacaactacggaagcggagcgtgtagttatagtgggctataaccgaaagccgttcttctttctcggtggctgggtgtgcgtctctcttacggactggacttgcctgtttctttcagcctgtttctgtaggtattcgttcaagtccttgcatccgctgtaggtctgcgaagcgtcacggatgtataagtctctgccgtattccatacggatttgccggagtgcttccatccctgcacggtcattgtcaaagaaacaatgtatgcgctcgtaactacccaacggatagagagccttgctcacattcgatacagagttcaataccatataatcttgtctgtccagttcgggaaatttcgggcaattttccaatctcaaagtaagaaatgaaagatagtccataaatccctcgaacacataacaggtattccttgctttccccgactgtctgatatgggagatttcctttggggcgatgcagcccttgaaataacggttacgaatctcatagccgcccgatatgtttggaaaggcaatggcgaaataccgtttgccgttgttggtgaaatgagcttcgcggcattctcttttcgccagttccgtgtttattcccctttcctgcaaataggagagcagggcaggagaagaaagcggtacaatctccagttgttgaaaacgtggctcggaagatgactgcttgccaaaagagaaagaatcaggacggatatgtggtgtctgttctgctatgcgttctaatatataaggtatatggtcggtagcatataagtgtgaagccagttcgatgatgccgccgcctttgccgagtgcaaaatcataccattggttgcgctcggtatttaccttgaacgaggcttcggtttcttcccttaacggtgatttataccataggttgataccctgttgtttgacgggagaatatcccaaactgtgcagataatccgctatcctgatttgcttggctgtctgtatatccataagataattgtttgagtagttaatgaattgatttatttttcttttcgcccgtaccattttaagaagtacggtctatataaccacttcactaaattgtcgtatatatagagtacggcaataaagtgaagcggtttatccattccttgcatcacttcgctttatccttaatatatagacccacagaataaagtgaagcgagtgcaggtaacgggttaatagtggaagtcgggcatgaatgtgtattttctgccgttctcctgcactatcatccgtttgttgcgaagcatggtgatgagcggtaccgccttttgatggttcagctttacacctattgacgtatagcttttgattaaggcatcttccagttccttgtaaccgtattcctctttcagcccgaaaacggcttccaatgcgatacggtgctgctgctcggtaatatgcctgtaagggtcgaacttttcctcttccggtcttcccggtttcttcgcttcgggtttgtaaccctctatgagttcaggcaaggcactgtcattgatacgaaaggcaaaaggctcgaaatccattgcccggatgtgcatggctgaaacattgcttatatctccgttgcttttgtctttttccaccagcaatacggtttccgccttattgttcaactccgtgccgatatgccctctcgcattctcatcccctttgttctggtgcagtatcgtatggatatgtatctgcctgtcgtccgtccactgcatcagtttggatatgatgcgtgtggattcgccggggctgttgatgtcatataccatgtcacggatgccgtctatgattacaagaccaatgtcgggcgtattatagatagcctgttcgacaatcctgatacgctgttcaggtgtgtattttctcaaggcgagaaactcaaggttctcattatccctgtcatcaggcaagtcagccatccgtaaaatgcgtttcatgactttcaggcaatgataaggactttgctccgtatcaacataaagcactttccgcttcccgtcggagagttccgctacatattgcaacactgtgccattcttcaatgcagcggctacaatagccgaaacattgaatgtctttttacttttggctttgccgatggatgcgctgaaattgcccaatgtcccaatgacagaaccatgcactttgaggatttcaggtgctttctcataacttttcgacagactcaaacgtgaggcttgccaaaggattacggcttcttctgccgatatgttcttaaattctttcatgtagtccatagccattcctcccgttatttccgtcctccggttttctttcctgccagttcaagggcaagttccgcatccacgataatcttgcgccctatttgcgtaatggctttgtctatctttccgcttttctttatgcggttggcggtgggcaggctgcacccgaacagtttggctatgcccagtattccgtacacatattttctttctgtgtccgtaacgggtcgtggttgcgtttccgtttgaccggaagcgtgcttgctcaggaatatgaactcttcgcctgtcatctgccagacgggttttaataataactcttgaagatttgtcatcgttcaatctatttagccgttaaacaatcagccctgcgcactggctgttatttctgttctcgaacgatgcaaaattagataggggcgtgagtggtaaggatgtggttagcgtaaatggaatattttattatttctctgaatatcagataataaaaataccactcaaaaattaatttgagtggtaaaagtggtaatttcgtaaaatatcagggtgtatcacggattatcggaatattgcgtccatttctttggcgaatttctggttactgtcacttggaaaatccgacaccggttccttgtactttgacttgtagtagttctcgtcaatatccaactgtttcaggattatatttttccatttatctctgtcttgtttgggcagtctttcactcatcaggaatatcaggtaacacacccgtattttttctcgtgccttgatttttagtcccttttcaccggggtacaggttcatgttggcatagaagtcctgcgttgaaatatcttcaaactgttcccccacacaggctttatgaataagcgaaagtaattctgtattgaaatattcgggtcgctcctttgatacatcctgttgtgtctcttgcttgttcggctcatccggcttgtcttttgctacgggaatatattttgccaatatttccataaaatggaaactcagtttataaatatctccgcaacggttctcaatatattggaaagcttccttccttgcctgccgttccaattcataaagcctgtctagttcttctttttcattctcatattcagccttgcagcgttcatactccttttcggcttgcttttcttctgctgccgtatgtaccctgtagccaatggaatcatacctgttgtatgcttcattcaaaggcttgcttaatttttgtgtaacctccaattgtgcctttatatcagcgtcatatctgtcggcaaagttgtagcacacacgagaaattatctcatcatcaaacaatggatgtttttcataaatgagtatgtttttctctatctcggttctcaggctgttgagaatcagagtatatttttctttctgtttgtcaagcaccagttcaaggatggcggcttcaaaagcttttgtgtcattgtattgcttatagaagtccgtgatgaatttctgcttgtcaaaagagaaagtatggctgactataaagtcgctgtatatccggttgagttcgccgtattggggaatcataatctgtatttctcctgccatatacgcttggtttatggattcttatctttatcaagaagggaagtcagttcttcctccacttcttctatacttggcagagccgattttaagttttcaggtatagccttgctcagttggtaatcgctgatgcctatcggctggtcgtagcctgtcaatgcgtattgcgctacaacttcgtctttccccttgcacagcaacaacccgatagtcttgttgtcattctctcccctcagtttgtcatccaccacattgatgtagaagttcagttgccccgcatactccggtttgaatggggtcgctttcaattccactacgatgtatgcgtgcagggggatggaatacagaatcaagtctgcatagaaatcgctgttaccaatttgaaagtgtttttgtcgggcaacaaaggcaaagccattgcccatttccagcaagtaacgggtgacgtgcttaaccaattgttcttctatgtccctttcgtccgccttttccttcgttccagccaaatcaaagatgtacgggtctttcaacaggtaattggcaaggtcgctttgcggtgcaggaagcgtggctgtgaaattgtttaccttgttgttgctgatttgtctgctatataagttggtctcaatttgtattttaagaacattactgctccagcccatttccacggactgtttcatgtaccaatatcctatgcctaacggtaacgagccatcaagtataaccatttggcttgcccagtttattctggcgacaggggagttcaagaaaattttttctatctccctaattcccattctgtaaatggcagaaacggttttctctacgtcctgaatttgcgcaggagtttcctgcgtaaattctaaagactgacaatcaacggattgtatttgcgcagtaagttcctgcgcaaattgcttgtcgttcagttttaatacttcatttgttacattctgtatgtttggaacagacagtcttgcatccgtatcaatgaaattctgcaatgctctcaatggatatgttcttgcaaactgacacatataggtaaggttgcgttctgaatagcctttcttttcagggaaattcagccggatagcctttgccaactgtttgatggttttgcttccccatccgtgcagttgctgatgatagagaatatagttgcccattttccagtaatggaacaacatttgcgcattggcagcggtaatcagccgtacttgcgcctgttgtatttccgaaccgacagcatttataaatgcatcaaaattcgtcttttctatgttatgtccgttgttgctcatcttatgatattttcagaatacaaatatacttcaatggtggtaatctatgaaactaattgacctcaaatccgcaactacgcgcctaatatgatacagaagcgaaaagaatctgcatcgttagtaaaaagggggcacagtgcatcgaatgtcaccataaagacatataaatgccccttaccccaccatgcgacttgaggcaatacgcaaaatcacgactataagttgtcggtgttatccaaagtcattctggaacacattggcataagcattgttgcatgaatagatattcagcacatacttccttgatgtcctgacccatttggctggcacagagatgaacttaaagacaaacgtcttgatgcggcttgttgctttgagtccgaacctcttcacgtcaagcctcgccatgatgaatttatagaagttgcgtatgagtgccataagcagaagaaacaccgtgttttctcccataaaggattttggaagcctgttccagccgaatccgttattcatatcatcgaagatgcgttccttccctccacggaggttatagaattcgacaatctctttctcggaagactcgtagtcatttgtaaggatgcagcggtaggtgtattctccttcccacaggtcgagttcgccgtctatccgcttctgtctttgaatcacaagacggtatgccttccctttccatttctcgatgagaatggaggccagctcaaactcaatgccgcccaattccactttcttccaacctctgagggcaaagatgtcattgtagagcgaactgcatcggttagcacggatatagaaggtcttgcagtgtttagcaatctcttccactatctcttcagaacacgagccgcaatcagctctgaaacggttgataataagcttgttttgttcaaacctttcaaagaacctcttcagcgtgtccttctggtggaaacggacatttgtgttgccgtcgctgttctcaatgccgacaatcaagttgccaataaccgccacgccagggcgataaccaaggaacttcttgtatgtaggcttcgcatcaaacttctcagcctctatgaactggtggtcgaagtcaacgtcatacccctcgccctctttcagctgccctgtggacaataggcaattgaggagcagtgtattcagcttgtctgccgtgttgaagtcgtaggtcttgccagtgtcggatgtgtaggaaatgttatcctgggtcagttcctttatggctctaagaatcgtgtcggcactgcatgtgcgaagtgtcggatgaagcgaaaggtggtacatcagatgagtggtgacatcctcgatgcatgagccgccacaaaaataaacgctcataagcgaacggatgatttcgctgtattgataaccatacagcctgcatctcataccgagggttgagtcgattacagatgagagtctggagtcaaattgctccattattgaaaatattcctccaaaaggagtgagtttctcggatttaattgctacctttgccatgtctgtcgggtttgatacatattttgatttgcaacactaagataggtgaaaaatctgacatggcaaattcctgagcaactttttgttgctcaggtacttaaaaagttatatttgtaatagtgttgcggaattaaggattgatacttttatacttgattaaacttgttcatggcgtttgctctgatgtcatccgctatatcaatgtagggcttcatggctttgtaatcactgtgtccagtccatttcataaccaccggcgccggaattccgagtgccaacgcattacagatgaaagtctttcttccggcatgggtacttaacaatgcgtatttgggtgtgacttcatctatgcgctcatttcccttgtagtaggtttcccgtacaggctcgttgatttctgccagttcacccagttctttcagataatcgttcatcttctgattgctgatgacgggcaatgccatgtggttctcgaaatgaacatccttgtatttttcaagaatggctttgctgtggtcgttcagttcgattatcaggctgtccgcagtcttgactgtggtgacttcaatgtggtcgggtttaatatcacttcttttaaggttacgaacatccgaatatcgtaagctcgtgaagcaacagaacagaaagacatccctgacacgttccaaatactgcttgtcatgcggtatttgataatctttcagcttgttcagttcatcccatgtcaggaatattacctttttaggggttgttttcaatttgggcttgaatgcgtcgtatgcaatgttctgatgatgcccttttttgaagctccaacgcaggaaccatttgagaaaccccatctgtttgccaatagtgctgtttctcatgtcctttttatcacgcaggaaattaacatactcatttagcccgaattcgttgaagtattcaaaggttacatcctccttgaattctttgatgtgatttcttaccgctgcaaatttctcataggtggatgccgtccaattattctggttgccacactcttttacaaactcatcgaacacttcccaaaaactaatctgtgcttctttctgttgttcttcactgctgtctttcatccgcagattgaacgcatcctttagctgttgggtggtgggtatggtttcctgcacctcaaactccttgaacacgttttgcatttcggcatagtatttcagtaggtccgcgttgatttcggatgcgctttgtttcagcttgttagtacatccgttccttacccgttgtttgtcggcatcccatttggctacgtcaatccggtagcctgttgtaaactcgatgcgttggcttgcgtatatgacacgcatacggataggcacgttctctacgattggcacaccgttcttcttccggctctccaatgcaaaaatgatgttacgtttgatattcatatttgggtgcgtttgaaattctacacccaaatatacacccaaaaattgaaatagcaaaaggcatttagaaagatttagatttactctgcattgtatataatgtatgattatcagtgatttgcaattttatgatattttctgaaagcgtaggttcgggagcctgtctctccgcgaaagtagaaaagttaaagttgtagattcttgaatttgaacgattcaagaatttttctttttctagtattttccttcatcttttcaaggagcttatgttaaattggaatccggtaatttgatttatgaagacaatttcgatatatgattcgttgcttgttttagggcgtggaataggacaagtcatgtttcagaataatgcgttgtccggtttgttaatgttggtcggaatttttctgaactcgtggcagttgggagtattagcggtaggcggtaatataataagcacgttggcggcttgtatctcaggttatggacgtgacgatataaagaatggactgtatggttttaacggcacattgataggtatagcagtcggagttttcatgcagctgtctttgtggtctttgctgctcatggcggtagcttcatgtttttctacttggatagtacggcttttcagccggcagcattcacttcccggatttactgctcctttcattttttctgtgtggatattattgggaatctgtacttggataacgccggatttattgctggtttccgaaacggtatctgatactgtgcgggaggttgattacgttcaggctttttgtttaggtattggtcaggtcatgtttcaagaaaatttattgaccggactgttctttttggctggtattggggttaattcatggactggaactttttatactgcgctggggacacttcttcctgttctttttgctgtattttgggggatagatccggaaatgttgaatatgggattgatgggctataatggtgtattgtgtgctttggctttaggaggcaaaacttggaaaagctttgtatgggctttatgttcagtcttgctgtccgttgtattgcagtttgcagggatcaagttgggaattactactctgactgcaccttttgtactatctgtatggatgataatgataatgcagaaagtggtgaatacaaaaggtgaataatagacagtatccgtagttcaggcaaattgattttataatggatgtaaaacaatctaattgggatattattatggatctaaattgattgacgcaaaggctggaaaagtatagcttacgctcaatgaatcatttatgaagggttcctttcaagatccttcatgagaacatattgaaaaacaatatattgtgtaattatgaaggatttgaaggatttcccggtatctttttatatttataggttttatgataactccaatcccagtgcttcttttaatttcagcagattcgggtttttcttgctcatcatttggaaacgttccacatggctgtaagcacggatgttctcggtaggggcactgacacgtaccgtcatggtgattttccggttgtgcagtcgttcgcgtaaatgattctgaaccgatggtatcaattgtaccatatatttttccaccatatcattgtctactgtcacttcaaaagtcgtgtcattcaacaaatgcggatgcatgttcatcattcgtgcggagttagccttctcttccttgggcagggcggctgcaaattcacgccagtaatagtccagatctttttcattgaaaatataatcttcgtatgtggcatcgttttggacagcggtgcttgccgcttttgcttcttgcttttccgcagcttgctgttcgtgcaaaggacgacgcagggatataccgagtgagcccgccttgaacaccgggatttttttctcttctctggtctgaggcagcgggcttggacggcttgcgttcatactgccggctgtacttgtaccctgtggttgaggaacggcggttgctgcggtctgtgcagcggcagctttagcctgaggctgtggctgcgtggcggctgtggaagccgcttgctgcgtaaataggggttttaatatcttcttagggccacgcccaccacttacatcatcggcgtcgggcagagtgagttgggcgcattgaatcagtgtcagttctaccagcaggcgtttgtttttgcttgcacgatagttcaggtcacaatcattgcatagcttcatggcacggtacaggaatttctggtcacatttttgtgcttgttctttatagcggtcgcggataccggcgcctacttccagcaattgcagggtggaagggtccttgctcaccagcaaatcccggaaatgagaggatagtccggtgatgaaatggctgccgtcaaatccttttttcaatacgtcgttaaaaagcagcatggattcgggaactttgttttcaagcaacaaatcggtcagcttgaaataatattcgtaatccaagacattcaggttttcaatcacacttttgtaagtgatgttcccacctgtgaagctgactacttggtcgaagatggaaagagcgtcgcgcataccaccgtcggctttctgtgcgatgacagtcagggcttcgggttcggcgttgatatgttccagtttggcaacgtattgcagatggtcgatagtgtctttgatgccgatgcggttgaagtcataaatctggcaacggctcagaatagtcggcagtatcttatgcttttccgttgtggcaaggatgaagatggcatgatgaggcggttcttccaatgttttcagaaaagcattgaaggcggcttgcgacaacatgtggacctcatcaatgatatataccttgtacttgccgatttgtggcgggatacgtacctgctcaatcagcgaacggatatcttctaccgagttgttgctggcggcatccagctcatgtatgttgtaagaacgctgttcgttgaatgccagacaagactcacactgattgcaggcttcgccttcggcagtgggggtctggcagttgatggttttggcaaagatacgtgcacacgttgtttttcccactccacgcggtccgcagaacaggtaggcatgtgccagcttgccggtggcaatagcattttttaaggtgatggtcaacgcgcgttgccccacaaccgattcgaatgtagcgggacgatattttcgtgccgatacgatataattttccataagcggagttcttttttctaatatgagttctgcaaaagtacataaattatccgtttttatgggtaggattgcttgaaatatttctatctttgcaaaaatcaaaaaagggattctttgtatgagcaaattgctgactatttggaactacatccggcgccataagtatatgattacggtgctgatctttattgtagttattggttttctggatgagaacagcttgattcagcgggtaaagcatcgcagtgagatcagcgcgctgaatagtgagatagagaaatacagaaagcaatatgaggaagatacggagaaactgaaggaactgaccacgaatcctgaggctttggagaaaatagcacgcgagaagtatttgatgaagaagcctgacgaggatatttttgtgtttgaagaatgagtaaatcttataatataatttcgatggtaggggcagtcctgctgctggcaggtgcggtgttgcaagtcacccggtgggagcttgcgccttatctgtatacgctgggtgctgtgatgttcggctatgtgcaggtgatggggaatcgttatgatggaaggaattttatcatcaagcgtttgcgtagacagcagattttcggggctgtcgcactggtctttacaggagtattgatgtttaccatgaaacgtaacgaatggattgtttgtctttccattgccgctgtcctggaactttatacggctttccgtattccgcaggagttggagaaggagaaacgttaaggaatctgtgtcatttttttgtccgcgtttatcagaggcttatcttgtgaaaaataggagaacgcggacaacacttgttacatgttgtccgcgttctaaaaaatagttgtccggtattgttattccacaatggtcatttcatctaccaagtgtttcgctcctgcaaacttatcaataataaataaggtatagcggatatccacacaggctgcacgttgtaactggggattataagcaatgtcaccggtcagtccttcgtagttgcggtcaaagccggtaccgatcaattctcctttattattgaaaacgggggaaccggaattacctcctgtattatctgttcctgtaacaaaacagaggggcatttcaccattcttcatggcatagcgtccgaagtctttcttgttatacaggtcctttagtttggccggaaccacgaattcgtagttgttcggatcctctttttccatcactcctttcagcgtggtgtaatagttgtattccacaccgtctttggggctgtatgaacctactttaccgtaagtgagacgtaacgtggagttggcatccggataaataggagtaccttcatgctgtttcagcttcatcatgccctccacccaagttttatgggccagattataagcgtcggtttcagctttcatggctgcatcggtatctgcataaccttggtctactgatttggcatattgcaccatcaggtcattttccaatgtcttggcatccggttttgccacaaagctgttgaaggcctcacggcttcggaagatggatgtatcaaaacaagcatcgacaaaggcgtcaatgtttcctttaaattctttgtctattactttaaagatactgatgcgctgtccggccggaattaattctgcgtaagttttcagcaaagctttggaaactttgcggtctacttcgggattataatctttattgaaaaacttatcagcctgtttgctcagtttgcttaatgcatgatccagcgggctgatttctttagtggcgtgaggtactttatatccttctttcaatgcttgcaggactttatctgtagaaggaattttatagaattccgttcccagtttgcaaacttcataaatggcttgctgatgatatacggcatcatggcgtttgctcacgatttcccggatagcgtcgaaggctttctgataggcgtctgtacccatttcacgtccataagccagaagcttttcctgttgtttctttttagtatcaagtactttcaggtgaaccagcccttcgttcataccgatggcatttttccagtagttggctgatgaagcgtatttactggcgtactggatgcgtactttatcacttttcagcatttcttccagcagattattcaaacgtacggtgcggatggtcttacgcatgaagttggtagtctgcatacgttcttccacttcgtccgaaatcatgtatcgccagttgcgtccggggaatcccattacgaaagtgaagtctccctctttgattcctcccaggttgatggtcagatgttttttcaccttcaaaggtacattgctttcgttatagtcagccggtttaccgtcgggtgttgcataaatgcggaacatggagaaatcgccacagtgacggggccacatccagttatcggtgtcagctccgaactttccgatggaagaaggaggagcgcctaccatgcggacatctttatagatggtctttacaaacaagtaatagcggttggctccgtagaaaggctttagttccaaagcggtgaacggagtgatttctatcttttcttgttcggcaaaacgtttggctactttgctcagataggagggggacaggtagttcagtccttccggatcctcatctttggccagttgtttctttacgtaaggagtgacgtccagaattttgtctatgaaggtgacagtcagccccttgcagggaagttcttctttgcggctcatagcccagaagccgtcagtcagatagtcgtgttctactgaactgtgttgttggatatagctgtaaccgcaatgatgattggtcagcacaagaccttcagcagaaatgatttcaccggtacaaccgcctccgaaatgcactacagcatctttcagactgatgctgtccggacaatatactttatcaatgctgatatccagtcccatatcatacatggtggccgcattctgttctttcagatcagtcagcatccacatcccctcgtcggcatggccggcaagggttgtgagggtaaatagcgagagtaatagtgcctttttcattattcaacaatagtcatttcgtcaatcaggtgtttgcatccgcccaatttgtcgatgatgaataatacataacgtatgtccactgcgatacaacgctgcaggttgttgtcgaaattaatgtcaccactcagtgattcccagttaccgtcaaaagcggcgccgatgagctcaccgttaccattgatgacaggagaacctgaattaccgccggtaatatcattggtagtcaggaagcaagcaggcatatcaccgttaggtaatgcataacgtccgaaatcttttgcttcatacaattccttcagtttggcgggaacaacaaattccggattggtcggatcttctttttccatgacacctttcagtgtggtgtagtatttataatgtactccgtctttagggttatatgacttcacattaccgtatgtcaggcggatagtgaaatttgcatccggggctttgggttccggtgaatacatttcacacaggccgcgtacataagttttatgtaataagtccatgcctttcatagattcggccagttcgtttcccagcttgttcatcaagtcatatttagcccgtacatatgctgtcatcggatctttttctatggctttcacggtaggtttcttgatgaatttattgaaattcgcttcgttggagaagatggaattgtcataacaatggtctacgtatgcgtcataattccctttgaaatccttctggatggtggtgtagaaggcaggtaaggcatcggcaggaaccattttggcatacaggggcaacagagctttggccactttgcggtctacttcatgatcgtagtccttgttatgtacatcggcatatacttttttcagcgtttcaatatttttattaatcgcttctttatctttatttttgattgcttctttcagcttgtccagaatcagataaggagtgccgaattctatacctccttgaaagacttcacggaaacaggtgtagttataaagaataggattactcttttcgatggcggcatcaatttcgctgactactttttcataatcggtgttgcctttggctttagcaaatgctgcgaacttggcttcctgttctgcttttgtttccaataccttattgtcgataatggctttattcataccgatagagtttttccaatagttgctggaacctgcatatttgctggcgtattggatacgtactttgtcactggcagccatttctttcttcagtacgtcctgacgcacaccacgtatgcggatacggggttcgttggtggaatgcatccgttgtttcacttcactttgagttagatagcggttggtgcttccggggaatcccataatcatggcatagtcaccctcgttaatacctttcagggagatagccagatgctttttggctttcagaggaacattgttttcattatattctgccggttcgccgttggcatccgcataaatgcggaagacggagaagtcgcaagtatgacggggccacatccagttgtctgtttcaccaccgaatttaccgatggatgaaggtggagcggcaaccatgcgtacgtcgctgtaggttttcagataaatcagatagaatttattgcctgcatagaaaggcagagcttgtgcgctgatacctgctttcccgttcaggtcactggctttcagttcctcgtcggccagttttttcaggaagtcgtattcaaaggtttcctcttcttttacttcgcctgattttactttattgtttactttatctgtgacatcaacaatgcgttctacaaatttgaacttcaatcccggagtcggcagctcttctttgcggctttttgcccaaaaaccatcagtcagatagtcatgttctaccgagctatgttgctgtatcgctccgtagccacagtggtggttggtcaggatcagtccgtccggtgagatgatttcaccggtacatcctcctccgaaaatgcctactgcatcttttaatgaaacgcggttcgggttataaatgtcgtctgcttccagcagtaagccttgtgctttcatgcggtctgccaaatgctgctcttgcatcagttgcaacagccacataccttcgtctgccttcgacggcaagaatgctacacacatcaatgcgagcaataaaagtttgaattttttcatgttgtgtactaattgttatttctttatccttatatcggttacaaaaatagaaaaaaagagggaactttgcactataaattgccttctcggtaataatcttctatttagttttaaattttaataaaatgtttttgtcactaaattatagattgtacctttgtatgcgaaaaatagtaatggggcgtagataagcatgaataaactttttttctctgtggtatctttattggcttttacttcatgtgccagtgagtataagatagaaggtagttcttctgtttctcgtctggatgggaaaatgctatttgtaaaagttcctagtggagaccggatgctgagtattgattcggcagaggtgattcatggaatgttcaagatggaaggtataaccgattctacttcaatggcatccttgtatatggatgatgagagtatcatgccttttgtcattgaaaaaggaaaaatatccatcagtatcgacaatgcccgtattgtggttaccggaactccgttgaatgatcgtctgtatgattttgtgggaaaaaagacttctttggacgacagagcgtacgagctggagcgtcaggagagccgtatgattatggatggaaaagcgccggatgaaattcaacgtgagataacgagagaacgtgagaaactggctgctgaaatgaatgcattggctaaggagtttatccagaagaattatgataatgtattgggaccgggtgttttcattatgttgtgcagcaattttccttatcctgtcatgactcccttgattgaggaaattatagaggaggctcctgaccgatttaaaaacaactccttggtaaaggagtatgtgacggtagcccgttcgaatatggaaaaattaaaagctccccattaatgaggagccttttttatctgtcttggtctggattgtctatctttccttgatatttttcaggtaagtctttctcaatttccctgtaagcctcttccatggtcgctttgatgttttccattccctggctttgcggataaatgggcttgtgtacgactaatgtcataggatgccaggatataaaaccgccggtacggggaagaatattaaaggagccgataatagtgagtggtactacgggaagttgcaaatcatccgccagttggaaagcgcctttcttaaaatatcccatgtgcccggtaaaagtacgtgcaccttcgggaaataccactagagaagttccattctgtagtacgtgacgggcatgttctatggtttctattactttcttgggaccggatttatcaacgaatatatgtccggcagcttcacaggctttgccgacgaaaggcattttgcgcagactttttttcatcatccatttaaagtttcgtcccagaaaaccataaataaggaagatatcgaaagatccttgatgattggctacaaacacgtaggatgtttttttaagtacttccggatgtcctactaccttgacaggaataagtaatacatagcagaaaagctgtgaccatatctttcccggataatatccccaaaaatgcggatcgcctatccatgaaccaataatggtaactattgctgtaagtatggttaataccagcaaaatgggaagtgctatgaatagttggtataaaatatatagtactttcatttgtctgaattttagttgtacaaagatagaaaaactattttatattttatgtaacgtgattacagtaatttccggccatgctccaaggcgcataggaaacatcagatagcctaaaccgatattgacaaacaaggattgttttccttcctggtataaaccgttgtgttcgggatatacgaatttagcaggagagaagccaaacaggctgaattgcatttcatgggtgtgtcctgaaagcattagctgtacatcactttccggcaagacttctctgtgccaatgagtggggtcatggctcattaatattttatacattccttccgttccttttaatgctttctgcagatctccatgattgggaaatgggggatttccgctgttctctacacctgccaaggctatactgtctccatgatgatgtagaatgacatgatcgttattgagcatcttccatcccattgcagcctgtttggatttcaagctgtttagattggcttcttgagcttcttctgtttcccattttatataaggagaatagtcatggttgcctaaaacggaatacactccgtcttttccttttatctgttctagaatagggataaattcgtccaattccgttgccacgttattgaccaagtcacctgtaaaaagtaccaagtcggcatgttgtgcattaatgaggtttacagctttctgtaaggcagcactgttgccggtccagctaccggaatggatatcagatatttgtacaatgcggtagccgtcaaaaccgctaggaagttcatcggaactgatggttacctccctgatttgaaaatgttgttttccttcggttgctccatatactacatatactaaagaggctaaagccaatcctcccgctacatatcctccatacagttttttgccggagatgatatataggagcttcataaacaggataacaatgacgaaaagtgccttgggtacggagaagcaaagaaaaatcaataagaaattgctaagtcgctgcatggaatccggacgtggctcgtgtatagaaaagactaatgtcattcccaataaaagaaacagactgggaagccaataggcccaatgtgtccatttttgggaaacacggcgtatatatgctttgtatatatacatatcgggcaatatcagtagcactagaaaaaacagaaataattttatcagcatcataatttattcgttttttatagattggcggcgagaaactttttagtttcttctatactcataccccggcgggcggcgtaatctgccaattggtcttcacctatttttccgatggagaaatagcgggaggccggatgagcaaacatgagtccgcatacagaggcatggggcttcatcataccattctcggtcaatgaaattcctatttgcttcatatccagcaactcgtctaataagaaattgatggactggtcgggtaaggagggataacccacagcaggacgtatcccttgatatttttcattatgcaggtcttttacgcttagattttcatcaggtgcatacccccaaagttttttgcgtacatcttcgtgtagcttttctgcagtagcttccgccagcctgtcggatagcgtttgtgctaacatacgtttatagtcatcttctgcataaagttgttccatctctgcatctaccgtggtggcaaatgctccgattttatctgtaatccccgaggacagaggacgtacaaaatcactcagacatagaaatgggtcatcttttttcaattttgcggcttgttggcgcaaaagcgggaaacgcttgccattcagcagtaaatcatctccatccgcattagcatccatgatgttgaccactccatgagtttgatacactgcgtccagctggttcaacatccggtttgcctctttgaaaagctgcatggcttcactggctttcggacgatcttcttccgtaaaactagtgagccacatggcacggcatgaatcacacccatgtatgtccgcgatggcggcaaatttgggctggaacccccatgcgtggaaaaaataaatccaattaatatattcgctgacttcgtgaatcttgtaatctacaatcatcttttaaatcttaattcttgtccgcgatggctttcatctactttgttgtcactgtaaaccaagtcaccattgacgaatgttttttctactcgtgaatggaatttttgtccttccatcggactccatccgcatttgcttaaaacgcaatcggctgttacagtccattcatgatccggatttactagtaccaagtcagcttgataaccggggcggaggtaaccgcgtctttcaatattatataattcggccggtgcatggcacattttttgaaccaattgttccatgcttaatacgccttcgcgtactaattccatgatggcgaccaatgagaactgtatcatcggcatacccgatacggctttcaatgccccaccttccttttctttcagcaaatgaggggcatggtctgtacctattacatctatgcggttggtggataatgctttgcgcaaagcattccggtcttctaaagttttgatggacggattgcacttgatatgtcctttcaatgcctcataatctttgtcatagaagtatagatgtgacacgcaagcttccgcagtaatctttttttcactcaggggtttgtcttcaaacaaatccagttcttgtgcggtgctgatgtgcaggatgtgcaggcgggcattgttttcttttgccagccggatggctaatgaggaagaatatacacatgcttccgcactacgtatctgtgggtggtattttatatcaggatcttctccatatttttctttgaaggctgttgtattggcgctgattatagattgttcctcacaatgtgctgcaatcagtatccctgcattggcaaatacttttctaagtacttccatgcggtctaccaacatatttcccgtgctggctcccataaataatttaacaccgcatacccggtttttatctagtgtggggagtatatccgcattcgtattggttgctccgaaatagaatgaatagtttacgatgcttttggttgccgcatccgcaaacttggcattcaaagcttccaaggttgtagtttgcggagtggtgttgggcatgtccataaaactggtgactccacctgccgccgccgctgtgctttcagtatgtatgtcggctttgtgagtcagtcccggatcacggaagtgtacatgatcgtctattactcccggtattagataatagcctttcgcatctattatttctccacaaggctgggcgggaactgtttcttctgccagcacttcagctatgacttcattttcaatcactatcgaaccgtgaaagatcttgccttcattcacaatccgtgcattctttatccatgtacgtttcatactgttttcttttgtgggtatttgcggaaccagctacccagttttaattgaatgactcctagtacagcttcgccgaagatacttccgttcatttttgaagtacctaattcgcgattgacaaaaatcacaggaacttcggctatcttgaatccgcacttgtaagcagtgaacttcatctcaatctggaatgcataccccttaaaacggatgccgtccagaccgattgtttccaagacttcacggcgatagcatttaaatccggcggtagtatcatgtatgggtaatccggtgataatccgtacatatttggaggcgaagtaagacatcagcacacgccccatcggccagttcactacattcacaccactgacatagcgtgaaccgatagctacatcatagccttcaacggcacatttgttatacagccttggcaggtcattcggattatgactgaagtcggcatccatttcaaatacaaaatcatattgatgttctatcgcccatttgaatccggcaatgtaagcagtacccagccctaatttacctttacgctcaaccatgaaaagacggtcggggaattctgtttgcagtttacggacaatagttgccgtgccgtctggtgagttatcttcaataatcaatatgtggaagaatttttccagtccgaatacagcccggataatgttctctatattttccttttcgttataggtgggtataataataatactatcggatttctccatacattttttgtattagctgaataaatatcatacaaaagtaactattatattaacactcccgtcagaatttaattttattaattaaaaaaagaggattacccctgcctggcgcacggataatccccctatttaacagaatagtttagaaatctttagaatgccacaccaaggcggaaaccgaaattgtttaatttatccatatcatagttaaatacggttcccttgttagtagagtagctgtagaatgctgccagatggaagccgatactgtttgtccaagggtagatattcacaccgacttctggtgatacatagaaaccccaagtgttgtctttcacttcgtaaatgtaaaagtcactggacattttggtatagttggcacccagcttcaatccgatataaggttggcatgcaccgtcactgaagcgatagtgtgttgcgaaaccgaaaggcaactgaaatacggaatgttgctggtcggttgtcagggctgccgaattgctgattggtaatgtctgacgtgaaatatactcattgttggtatgataattgatgaaggcaccgattgacaaatccggtagtacataatatccaccttcgaagttcataccccaaccgcttgctttgtttgcaaagttattgctgataggagcgttgaactgccagtctacattgaaataggtaaacggagttacctgtgcttttgccggcagggcaaaggctatggcgatagcggctaccgccatcagtctgagagtaaaatattttatagttttcatatttcctttttattttaaatgaatacttgtttcacttacgtttattttttcagataaggactctgagtgaatgcttggttgatggcagtagttgtacggtttacattcaaactgccacttccgcccagcaacccgctgatgtatgcattccagacaacagttaatttctctttttgtccttccggagcattttttaaattaatcatgtcggccagcaatgaaccagtgctatagctgtaagtgataggatagggatagtaccatccacctccccaattgccgccccagtatccgggataccaataaccggggtaatagccccaccaaggaccgtcattgtagtagccatggaaatagtaagtacttgctacataactcacctgtagaccgaggtcggcgtcgtctttatcaactgcggtgtagccggcagcgttcatcttagtcttgaatgcattgatgatggtctgtgcattctcgtccttccagtattcagggtctttcttgtcaccgatgatcaggatgctgtcagggatataataagtactgaaatcattgaatttagtactagtgtcatgactggtgaataccagatactcattgtccaatttgtccatgtccgggtctttctcgcaagataccaaggcaaagaccgccagtaggataggaattaattttttcatgtcaagtttttgtttaagttaatactaattgttttcgtctagtttctctcatacaacggccagcttatgtttttgttcactaacagtctgttctttagtgaatttttttgctgccgggttaattagagtttcttttttaaagtgtaatttagtttagaaacagctttcttgaagtccttgccaatcattgtcagtgcactgtcaccctctgccaaaaagtttgtcttttcgtgtcccggagtagcggaaactaattgataaacgatagcggtgctgtcattaggaattccaataatagttacaactgtaccactgtcggtaaatgcctggttaccatcttttgttcctaaataagtggtcgtcagattgtacgttcccagtgagtcttggcctgcctcctgaagcgtcagttgatagttgattccttcggcatcggcagctggcagaataccttcatagctatatgtttgtaactcacccagtgtgctgtcgttcacagcgaaaatagagtcactttcactttcggctattatttcagcacttttgtttcctttagagccacaggaaacaatcatggcagccaaagctgctgcaataaatacttttttcattgttaagtcaggtttttaatggttatttgggtacataacatctgttatgcccgttttgtttttaataagttctcttttcagaaaaaaacaagaccatgtttaaaatgcattaaacatggtctttaataaatggggcgttgtatctggataagtcagactaccgtagccgtatgccgttcatacttcttcgaatcagtgagttatagataatttttccttttgatacttgttcttctgcttgtggcaggtcgggcatacttcctgtcgtaatataagctatggtgttcttcaataaatactcttgggtgtctcccagtgggtagagaggggagatgaggttacgttcgctcaatgtgaaatcgggggtgatgccatttacatagttggcttgtcctgccgagttgagaacgtatgccactaccggccataaaataaagttgtaacgctcatcttggtatggttccatggctacatttttgccaacagtcgtttcacctattaccactacattttctgtgcctatatatggacggagacaatttatgacagcttctgaagccgatgcagtaaatttgcttgttagtacataaagcttgcttaaattcaagttttcggaagcaagtcctgtgttgagggggaaatcaactttttgcgggtcactgatattattatacaaagttgtgcaaaatactttccctagatctactgcgggtgccagataacttcctaaatctgtggcacaactcagataaccaccgggattgtatcgtaagtccagaataaaagcatcgggtgactgccctttgaaccgggcgaatatctgtttcatttgttccctgtattctgtatctgttgcctggttattggggcctgtactgaattcattgtagaccatataggctatttttcttccggatacttcatatatggtatctatatagaacggattcaattctacgggtcgtgatgctgctactttgactgtatctgttgcaatccagctggaattaccttcctcatcaaaaaccaagctttctctggcgaaagttgtattgccaccttccatcagatatccgtaattattgttggttagctcttctttgccaatggctgatatccagttccctcgttccaatccggcttctgaggctggtgaattgggcagtacgaataaaatacgggcaaatacgtgtgatgagattccggtgggatcggtcattaattcaaaatcaaatccgtaagtagaagtacgttgcaggtaggaacgggccgcatcggaagtttcttttgtttctatatacgaatacgggtctccttttccgttttgtgccttggtataaaccaatttttgcaggaagttttccggttcggcaaaatagtccgtttcctttattgccggaatactgtcataccacaaataatgctctttcattatttgctctatccataaattctctccaactaatgcatagtattccccactgcggtcttcgccacatgaagccattataaataaagtggttagaagaaaaaaagtgctccgtatatgcttcataatctaattcctttttcgatctgcaaagctagggattttattttaaagtagggataaggtttggaataaataatccaaaaaacctttatataaaaaaagagatccgccggttaggtcaagcagacttcacggcggacgttcttaattttttagttcttttcagatttccatttgtcagcatattcattcagaattctgcggatactgagtccgattttgatataatctttctcgttcaggttggcaagtgatacacgtacactccattcgggtccgtcgaatccgccaccattcaatacgaccagtcctgtttcattggcaagacggaatactacgtccaatggattataagttgtctgcagatgttgtacgaattcatctccgtaaaattttttggcccataccagcatgtctatctctgaataataaccagcccttagtggatcgtcggggagaatgaaccctgtgttgtcccataatgctttcagacgggtatggattaaattaagcatggcatgacgatacgtgttttctttgtccagcaatgaaaaagaagcaaagagtgacatctgcatttgttgtggcaaggacagtcctgctgtatggttcaaggctacttgacggctatctgctaccatacggtcaatgaatttaatgttttctacttgcatgctcaagctgccatagcgtttggctagttcgctttttcgtttgcggggcagattagcaatcattctgtcgaatacatttttctcatgtaaggcaattacagcaaggcgccaaccggtcgctccaaaatatttggagaaagagtagacacaaattgtgttctgtggcaaatcagccatcaggctgcggaatccagggacaaaagtaccatatacatcatctgttataatcatcagattgggattccagcgtgttactacgtctttcagggcatctacacattctttgcttaactgataactggggggattacttggattgacaataaacaaggctttgtatttcgtgtctcgcagtttattgatatcttccactttgtattgccaggtatgaagcccttcttcatttagagtatttgcaggaatattgagcacatcataatcgtaacgtgtcaattcgggtatctcaatatagggtgtaaagataggaaccatcaatgctacactatctcctttgtgtagcaggaaattttcttccagcgagtcaaatacatagcacatccctgctgttccgccttcggtggcgaataaatcgaatttgccttgcgggggttgcccgttgcacatttcctgattcaggtaatcctgtactaaaatttctgtatatttcaagatgcggtcaggcatggggtattggtcgcctacaatactttcggtccattcgtgtactagctcgtccggatcggctgcatgttccatcagcatataattataggtacgtttcaatagatctgtccccgcatttccttcatgctttttcaggtattcctcaaaacgttgggctatgcctgttttttgaggaataccggcaatgccttcgggcatgtccatgacccggcgacactcttcaatgccaaaaccgcccaaggcaaagaatgcttcacgagcctccgttgcaatccagttgggattacctctgcctgcattcagcatgacgtgtgccattttcttcacactttcatctgccatttcaatcaaacggttttttaattcgaaagggctgatcttttccaaattcttgtccattcgggcaacgctgcttttattacttaaatattccataatgtatgagtttagtttttttagttgattaataatacaatgattactccccagatgatgagtagtgtatttcctacggcgtaggtcacggtgtatcctaaagaaggcgtttcgctgcctactgcttcttgtatggcacccaatgcagcagtggtagtacgggctcctgccgtgcatcccaaagagagggcgggatggaacttgaatacatatctggctagaatcagccctaataataaaggcaaggaagtagccaacgcacctatgataaataacataggacctacttcttttagtccctgtacaaagctgggtcctgcagaaatgccgactacggcgatgaatatattcaagcctacattattcagcacccataaagaggattccggtatttgtccgaaggtagggcgtttgctgcgccaccagccaaatactaatccggttatcagggcccctccactagtgctcaggctaataggtactccgccgatatggattgcaagtgccccgatgatacctcctagtaaaatgccgagtcctacaaatgtcatatctgtggcattggtggggcggtctatatatcctagttcttttgcagcagattccacctcttttttcagaccgaccaattccagagtatctccacagtcgatagtggtttgtgcgaaaacagggatatcaatacctgcccgtttgatacggcgtatactgactccatgcataaagctttgacggcgtatgaagtccaatttttggttgaaatatggctttttgtgtatcatgacagggagtacttccacagggaaatcaagcagttggggatcgacgatttcttctccaatccagtcttcctcaccaatggcgaattctcttcttccgctcagtaccacttcgtctcctttttgtaataattgtccgggaataatatcattgacaatggaagatctatgtcgcattctttcaacaaacaatcttttcccttgtgaaataaaataggattctagctggtcaacggtcttgccgttgccaaaccaatcgttctctatgcggtaagcgcgaaaaactaccggacggcgtgcttgttcaaatccgggctcgtctgcttcgctggtacccattcgggtttctagctctttgcaggcggctttcactttttctaatcctcccaacattttaggacctaaagaagagaggacccaggcagagcctgccgtaccgaaaatgtaagttacagcgtatgccacgggaatgatattaatcatatcacttttttgggaagaggctatgttgagtccgtttatggtatcttccgctacccctatgacggcagagatagtttgtgctccggccagtaacccggctgtttcaccggcattatatcccattaaggtagctaataaccaagtgataaccaaacaacctacgcacatgagtacggcgaatcctacttgaggtaaaccatcttttttcagtccgcgaaagaattgtggtcccactttgtatccgatggcaaaaaggaataaaagaaaaaacacggatttcaccggttcttctattgtaatgttaagctgtcccactaatacccctactagcaatacactggtgacgattcccaaactgaattgttttattctcatttttccaatccagaagcctgcggcgattgtcagaaaaatcgccagttctgaatgttgtctcaaaagatgtataatccattccatatttcacttcttattataattgctgtttaaaacagtgtgagggtaaagaagttgagttaaaaagctccaaattgtgcttagttctaatattttttattttatttgcatagagatgatgcttgacttatgaaaatgaagttgtttgtaaaatatatttctttattaattctcttgtttgttgttggaggatgtaaagaaaaaatggctgacatgtatgtgactaaggtcaccgatttgacaggagaggaagaacaagttttgaaattggaatatgatcgtgatggtaaaattataaagtatggagataccccggtaaggtatgagggcgaccaaatcacaatcggacagatggattgtttgaataccggcaataagctttgcaatgttacgtttcaaataggaaaaggcaaggcgagggaaagtagggcccgttgtatattgaaggtagaagaggaggtttatgaagttgataaacagactgtctatgattataaaggagatactatttttatcaattctgattatcgtgctacttccgattatcgtttcttgagaaaagtgcaaggaaaatatgtttttgatcaattgggacggttgaaggaagtaatgactgtttttactgaagcaaatgatagtgtgtctagttgtcatacttattataattatgataataacattaactatcaggcgaatttgaatttacaggcttatgtgattgattatgatggggtggatagtttcttctattttttattgaatcttgggcagttgaggaatagaacagccttacctaatgatatcggatattgtatgaatcatggtttaagcacttataatgtgcatgccaattatcgtctggatgatgagaatccggtcaggatagaagttttatataattataccaaacttctatcccgaatagatttatcttataatcctttaaattaattcatcgggaagtataaacaagtctacttcattggcgccttgctttatcaaatctttcttatctatttggtaaaggcggacaaactcgtcatgactgccgcatagttcctgggctttgcgataatattctattgatttttctgtttcattcaggatataatacacatgtcctgcattcatccagtcttccataatgggtttgggctcggatatcagcaagtcgtaatatttcttggcttgttgatggttgccggtaatgaaggaacaccatccgatggcgcgtcgggcattctgtggctttttatccagatactccactttgaagaaataagccagtgcttcatcgtatcgttccagtgccatcaggcattgtcctatttgtagcgtcagattcagattgtcaggctgtacttgttccaccttattataatattccaaagcttgttggtagtttccttcttttctataacattgtgccaaatggcggttattccatgcgttatcagggatcagcagatctgattgcaggtaataatctatcgcttttttataggaaccgattttctgataaatgaaacctgctttctgccataattcagcatttttacgattgtataattcaattgatttatcatagagaatcccggcttctgtcaggtcgtcgtgtgtgaataggtaatctgccagcttgttgatataatctttgtgcaacaaggcttgagacaatgtttctttattccataagtctagagtgtcctcaaaaatgtcatgtatttcatgtcttcttgaccataatttgaagaaacggtagaggtcatgaatatattgccggctcacgaattcagcgcgagcttttgattgtgacatttcttttaaacgttctttcagttcttcagaagcctcatgttgtccgttcaattgttgctgcatgagatttctttggctttccggcatttgtaacatggtaaaacaaaaagagtatttgtcggaattgcagaatacatccgagttcatcaaaatgttgagcagagagattttttgttcgtcatttccgagagataatttggcgatatcctgatattgggggtcaaaaggatagaaccagtgagaaattttgcggaaaaacgggaattgtttcagctgtgaaaaggtactcatatacacatccgccccggacatttgcagttcacctaattcgcgcaatttatcggtaatgcctgaacggtcaatccattcttcccattccggattatgatcttcggcatcttcatccagtccttccaaattaagtttgggatttttcatcatttcgggaatgatttcttcacgcattttcttgtctatctttcgggtttcacgggaagattgcaataattgaatctggatatgatgcaggtttttgatgaactcggtattttcattcagttcatttatgcgcgacacggcttcagggtattgaaggatacgcttttcataatagtagcatgttagtgcgatccctgcaatagcccgctgattcagcatggtatcctgatgggtataggcgttcaatagaaacatgaacttgcggatgtcgaatatttgcagcaggctcatggtgacggcgctgaccattatggaaaggtcgttgacttggatcaatagtgagttgaacaaaatttgcgcttcagcatattccgattcactccaccgggtggatacccatattttttcaaataattcgtctacggctgtttcgtgacgttttctcatggcatccatttcttcatttcttttggcctcggtggtatatatcaatggggctgtagccatatcttctgtatatgcctccaattgcatttgtaattcggcatagctgtggggagggctttggacaaaagtgcgcattgtgtcataataggctccataattttgtgttgcctgtacggctatatggatacggtcggtcagttcgtatgccgtgcgcaacattttatggtatatttctaccttattgggatctttcatcccttttgaagtatattgcagcatcaggtcgtatgacgtttgcagggcttctagctcattctttaattgccagtcggaagtatgtgtggcatatcctgtcatttggaataatgcttcttttaaccgatattggtctaatagttttatgatttcttcgcgcatattttaaagttctatttgtatgtcttttataaacaaatgccggcagacttcggttctcgatttatttcaaccaagttgcccgtttccatatatattccatcggaccgtgagagtgatgattcatccaccagcggcagaaagagaattgcaagatgaagaaaactattcctgccaggcagctggctgtgataccaaactgattgtgcaatgcaaatccccagttgtagtataacatagaacctactatactttgagtgatataattggtaaggctcatctttccgtatggcgttattttcattaatccgtcgtgtaagtttgtcttgtaaaaagcgaagacgacaccggataccagaatcagcataaatgcaaaattggaaagcgaggtgatgattagtgaaagaggggtcagaatggatttatttgtgataaagtctggtagcatattgcccaacccatataaagggaaaaatgagacgagtgagcctgcaagtaccttgttccataccttcaagtgctctttcaaaaaaagtcccttgcgccctatcagcataccgagcaggaagagggcggctgtttggaatacccgtccgtgatcccaggcccaggcaaggcttgccaactgtccttcccataaattgacacggatggtttccagaaaattaccattgctttgcactgcaaaagttgcattccagaagctgcgggtggggatggccggagtaacaaattccggatcgaagcaggcacgtattacataataaagcggcaatggctggattaatagcagacatgccaatgcaaatatccatttgtctttcagccggcaagtcagtggcaggatgaaacctactaaagaataaaggaccagcacttccgctgtgaaaaaactggcattgatattacctatcaggaaaagaagaattaaccgccaacaaaaacgtagacggaaatcattgccccgtaggcgttggttgtcatcttgaataaaaaagctaaaaccgaaaagtaaagcgaatatggcgtatgcttttccgccgaacatgaagaataacccgttccaaatggctttgtccgagaagttcagccacgcactttgtccggctgtatcgggaaatgagtagaaattaaaatgttcgatagagtgcaggatgatgattcccatcactgccagtccgcgtagcacatcagctacatctacacgtgcgtgtcctttcaattttgtgtttattgcttttgtttccatggggttatatattagcgtacaaaaataggaaaatcttgaatagttggcaaaaaaaggaggaagtaatcagatatttctttaattttgtccccatcttaaaaaaagatatggatatttcggaattgcaacgtatttatgccggtcatcctaacactaagggactggctgcgttattggaagattcctcagtgaggactattttcctgggaggattatatgcttctgcggcagctttatttgtttcctcctttcttagagagaataaacagacatttgtatttgtactgggtgacttggaggaagcgggttacttttatcatgacctgacacaggtgaacggtgatgagcatattttgttctttccatcctcgtatcgtcgggctgttaaatatgggcagaaagatgcagccaatgagatcctgcgtacggaagtgttgagccgtttacagaaaggcgatccgctatgtgtggtgacttatcctgaagcgttggcggagaaagtggtatcacaaaaggtactgatggacaagacgttaaaacttggtgtgggtgagcatgtggacacagagtttatcacggaagtgctgtccggttacggattcgagcatgtagattatgtttatgaaccggggcaatatgctgtacgcggtagtattattgacgtcttctcttttgcttccgagtatccttaccgtattgacttttttggtgacgaggtagacagcatccgtacttttgaagtggaaaaccagctttcgaaagagaagaaacagagcattgccatcgtgcccgagctgacgaatgccgccgacaagagcggggtgtctttctttgaattcattcctcgggaaacagttctggcaatgaaagattttctttgggtacgtgaaagaatacaggtagtacgggaggaggcactctctcctcaggcgcttgccgcatacgagggagagaagacggaactgatgaatttggaactgaagctgatagacggggcggaatttacagtacgggctttggaattcaaacggattgaatttggtaacaaacctacaggaactccacaggctacgttggctttcgatacgacagtccagcctatttttcataagaattttgatttggtaagcacttcattcactgattatcagaaacgaggttacaccttatatatatgtaccgatagtgagaagcaggcaaagcgtctgaaagatatctttgaggagcgtggtgatcatatcacgttcattccggtcaacaagactttacatgagggctttacagataatgtattgaaaagctgcttttttacagaccatcagatttttgaccgtttccataaatacaatcttcgtagcgacaaggcgcgtagcggtaaggtggcgttgaccttaaaagagttgagccagtttgagccgggtgactttgtggtacatatagatcatggggtaggtcgttttggcggtttggtacgcattccgaatggaaataccactcaggaagtgattaaacttacttatcagaatgaggatgtggtatttgtttccattcattccctgcataaaatatccaagtataaagggaaggagggagaaactccccgcctgaacaaattgggaaccggtgcgtgggaaaaaatgaaagagcgtaccaagagtaaaatcaaagatatagctcgtgatctgatcaaactgtattcgcaacgtaaacaggaaaaaggattttcgtatagtcccgacagttttatgcaacatgaattagaggcaagctttatctatgaggatacccccgatcagttgaaggcgacccaagatgccaaagccgatatggagagcgatcgccctatggaccgtttagtgtgtggtgatgtgggattcggaaagaccgaagtagcgattcgtgccgctttcaaagctgtgacagataacaaacaggtggctgtgctggttcccactacggttttagcttatcagcactttcagacttttagcgaacggttgaaagattttccatgtaaggtggattatttgagccgtgcccgcagtacgaaagatgtttccagaatagtgaaagaactggcggatggaaaaataaatattttgatcggtacacataaaatcatcggtaaaagcgttaagttcaaagatttaggattgctgatcattgatgaggaacagaagttcggagttagtgtgaaagagaagttgcgtcagatgaaagtgaatgtggatacacttactatgaccgctacccccatcccccgtactttgcagttctcgttaatgggcgcccgtgatctttctgttattcagactccgcctcccaaccgttatcccattcagacagaggtgcatacctttaatgaagatatcataacggaagcgatcaattttgaaatgagccgtaacggacaggtgttctttgtcaataaccgcatacagaatctggtagaattggaagccatgatcaagcggaatatacccgattgccgtgtctgcataggtcatggacagatggagcccgaaaagctggaaaagattattttcgactttgtgaactatgattatgatgtgctgctggcaaccaccattatcgagagtggcattgacataccgaatgccaatacgattatcatcaaccaggcgcagaattttggcttgagtgatttgcaccagatgcgtggacgtgtgggaagaagcaataaaaaagcattctgttatttgttggcgcctccgttggcttcactgactcctgaggcaaagcgtcgtcttcaagccattgaaaatttcagtgatctgggcagcggtattcatatagccatgcaggatttggatatccgtggagcaggaaatatgctgggggcggagcagagtggtttcattgccgatttgggctatgaaacttatcagaagatattggctgaagcggtgaaggaattgaaagaggatgagtttgccgatctttacgcagaggagttgcaggcagcgggagaagagaaaatcagtggcgagaactttgtggatgaatgtcaggtggaaagtgatttggaattgcttttccctaatgagtatatccccagcagcagcgaacgtatgttgctttatcgtgaactggacggattggaattggataaggacctgctcgctttcaaggcacggttggaggaccgtttcggaaaggttcctcccgaagggctggaacttctgcgtatcgtacctttgcgcagattggctaaacggttgggggtggaaaaagtattcttgaaagccggacgaatgactttgttctttatcagtaatcaggaaagtccttattatcaaagtgcggcttttggcaaggtgattgattacatgagcaagaatccgcgttactgcaatttgcgtgagcagaacggcaagcgtagtatggtagtcaagaatgtggaaacggtagagactgcggtaggtattctgcaggagatggtgagtctgtgataaaagatgtctgtattggcggatttctttcgtagaagagatgaaccaaccgatggttcggcagaaacctgcattgctgtagagtaagcaggatatgttaacgtaaaattgaatattaactaaataaatagctgatttttaattaattgtttaacggatttgaattcggggtgttttatattaaaaaataatataagacgctcctttttcttttaacttatctatatttttactatcttacttccagtttaaaagcggacactgagatttttactcacatattgtctaatttaaaaaacacttgttatggaagtgaaaaaaacacgaagagccgaccttgaaaagggtaagtcccgttggctgttcatggggctcattgtgacgctgtcgtttatgtttgtttcgttcgaatggactgaacgtaatgtaacttacacgatcagtgatctagtcagtgacccggatttctttgaagaattagttcctgtaacctacaatcaggataaacctctgctaccaccgcctccgccggctgccgtcaatccggaagagctcaatatagtggataatcaatcgacggaaacagaaaccgatattgccgcttcggaccctacggatgctcctgttatcataccgattcccgttgaagtacccgaagaagtagtggaagaaaatgtggaatttgtggtggtggaagaaatgccggtatttcgtaatggtaatgctgatttgatgaggtatctgagcgaaaacatcaaatatcctaccgtcagtgccgagcagggagttcaaggtaaggttgtggtacagtttattgtgggtgttcatggcgagattctgaatccggtagtggtgaagagcgtggatccgtatctggacaaggaagcaatccgcgtgatcagttccatgccaaaatggaagcccggcaagcaaagaggaaaagcagtgagggtgaaatacactgttcctgtagtcttcagactgcaaagttaagatttaattagtatggatgaaggaagcgtaatctcgggagaggacgcttcctcttttttatgacagtacggtcggctgtttatatgtgcaggacacagtgaagtgtcttaattaaagggtgtatcctaaatcgtgtttactttgttaatgtattgttttattgaaaggtacttgtctgtaagttgccaataaatccaatcttaaatgatattacgggaatctgaatgtgaagaataaatttcggtaagttggtctatgatataatagtctgataatcaaaattttcttgttttaaatgtttgcaacaaattggggctctcttcataagagaaccccaatttgctgcaaatatacgtataattcttcaatctgaaagttttcgcattagaaaaagtgtcttcaaattggcttaagaatgattattgtttgcaaaggttttaattctaaggaatattatgtgccacattatcaattgattaagatgaattggggttctcttatgaagagaacccctccaaaaagaagaaatttaagggcttgcctgagccttatatttcaagattatgaacttaaattgtaatgttttgatggcaataaagagcgatgcggaatctgtaaaagtactcccgtcagacaatcaaaacataacgagcgaagcgcctaagttactgctctgcagttcaatcgcttccggctcagacctggggtcaaatgaaggagtcacgccattggcgggaataggaaaggaatacccggaactcagttggtattatctgtatctgtctaataaagagctgaaacgctatatcagtgtattcagcggtaggaaagctgtccggttccgtactctatcggggagtgtagaggaggaatttttctgtttcaaagtgttttcctatacagctgccgatcataggaaacgtttcgagcaatgtgcttatactaaggaggaatatactgcccgccgtgactcagcccgggtggtgaaagaggcttttgctaccggttccacccaaaaattgaatactttgacggacgagaaggaaattgcaggtaatggctggctgtttgtctgtgctcccttggatcagttggagcgtattctgtctgccatgcttccccgccagtatctggtgacggactataacacgcatcgtgcggctgtcatccctcaaagccagatggaggaatttatctatctgtacgaatccatgccttacaatatcgaactgatgaaccgtcctttggaggactatcttcagaagaagcaaaaaatccgtattaccggtggcgtttttcgggggaaggagggatgcatcatgcgtttacaccggaatacccggctggtgttcgctttcggaaatatgacggtggcagtgagctatcttcatgcatttccgtttgagaagatagactagttgtttttgctggttttctatgcagaatcatgttctgatatcggaattctttgcatctagggattgataattaattatatctattaatatatttcataatgaaagaagaaatagtaaagattatagctgatattttagaagtagatgtttgtgatattgagatggataccgcagtaggtgaccttccggagtgggattctatgcatcatcttcagattattgcggaattagagaaagtctataatataaaattcaacgcatcagatttagcagaattggaggacgtttctgatctaatatccttggtggaggaaatgaaagaagcttaattttagttatgatgcttagtatagaacaaagaatatggcaacaagcaaccttacatcctgataagttagccgtgaagagtggaaaagacactgcgacatatagtgaattggtatcacggattattgcagcaaaagttttttttcagtcacttcctgattatacggcagggaatacagtcatacttgcagcaggtaaacaaatagagtttttatatgcttattttggtgctcatttagccggattgattgtaaccccgattgatgtagaaacgaaccccacccgttttgaatatatcgctgatgttattaaaccattttgtatcattgggtttgataaacaagaaacttctcttacaaagatatctttaaaggaattcaaggaaatgccggttgattattctaaacagtcaactgattttcctgacaatgaagaagtggcggatattttatttactacggggacaacaggtgttcctaaaggagttccgcttacctataagaatgaggctgctgcagctctaaacatcaacgcttacataggtaatacatccgatgatatagaattgttagctttaccggtaagtcattcatttggacttggtagagtcaggtgttgtctgtccaatggtcagacattacatttgttgggttcatttgtaaatgtcaagcgtatataccggacgatagaagaagagaatatcaccggatttaccatggttcccgcatcatggaaatttcttcaaaagatgtctggcgatcaattgggccattatggcaaacaactaagatatatagaaatgggcagtgcctatatctcggaagatgacaaacggcatctggcccaccttcttcccaccactcgtattaccatgcattatggattgacagaagcgtccagaagtgcttttatggagtttcatgccgatagcgacaaattgtcaacagtaggtaaagcttccccgaatactgatatacaaatatttaatgatcagggacaggttttgccttgtggagaagaaggtgaaatttgcattaagggagaccatgtaaccaaagggtatcttaatacgaatcctacatcatctttctattctgagggttatttccgtacaggagatagtggaacgattgattctgacggatacatatcaataaaggcacgaatcaaagaacttataaatgtaggaggcaaaaaggtcgctcctacagaagttgacgagcaaatacttaagatagccggagtgaaagattgtgcttgtgtaggtacaagagatccggaaggaatattgggtgaagtggtgaaagcatttgtagttaagggtaataatgaacttacctttgatttcatcacgaagcaactttcaggtaaacttgaagcctataaaatacctgtaatctatgaatggatagattgtataccgaaaacctctaatggtaagattcaacggaatttattgaagaatgattgatataaaagacaaaaaagattgttgcggatgcaatgcttgcggagatatttgcaatcagggagcaatcagtttcaagacagatgaagaaggcttttggtatcctgtggtagataccgtcctgtgtacggattgtcatctttgtgagcgcgtttgtccgattcttaatttggaaaaagcaaaaaagcacggacagcaatatcccaaagtgtatggtggctttcataaaaatgtaaccatacgttttgattccacatcaggaggagtcttttcggctttggctaatcatatttataagcagaacggctatgtttccggagcagtctttaatgatgactggtctgtatccaattatatatccaataacaagcgggatttaccccggttacgttccagcaaatatgttcagagtaatgcggaaggtttgtataggaaaattaaaaaactgcttgtagcgggcgagaaggtcttggcatgtggatctccttgccaaatggctgcattgcggacctatctggtaagagattacgaaaatttgataattgtagatttcctatgccgggctacaaattcaccaaaggcttatcgcaaatatcttgattatctggaagaaacgcatggaggaaaaatcatttatatcaaagccaagaacaaagatcatggttggcggtcattagcacgcaaagtggtgtttgataatgggaaagtgtattatggtgaaggtcatgaagaccattatcgtagaggatatcacggcaattattttgaacggccttcatgctatgactgcaagtttaaaggcattcctagaatttcagacattacaatgggtgatttttggggaattgataagattgacccctcattagatcataatttggggacatccatgatactggctaatacagacaaaggcataaaattcgttgaaactattcgctcgaaaatggagttgaaagagttcactcttgaaaatgtgcttttaggaaaccgtggacctgtcatgggaaattgttgtacagagcctaagaatcttaaccgggttgctatgtttcgtgaaatggatacactaaggtttgatgaactggctgccaagtattttccggaagaaaaacatggcgttggcaaaaaaactcttttaaagaagtccattaagtatctgttgaaaagcatgatacatccatgccattttattagaaatcttttgtggaaacttaactgccacgtgtcgggaaaaattaatgtgtatgctcattgtgccattgatttgcataaaggtgcaaaaataaaaatcaataacggtatattaaatataggagtaaaaaagaatagaaagtccaaggccgagacacggttattcatggataccaatgcaagattgaatatcaaaggttctcgtagttttatgtataattccgatattcaggtttttaaagacgctgaattgtcctttggttccggtaattgcaatagtggtttacagatagtgtgtgctgaaaaaatatccattggtaaggaaacttatataggaagggatgtctggattcgtgataataatggtggccatactattgtgcaggcagggtacacaaactccgctcctgtaattattggtgatttttgttggataggttccaatgttgttataatgaaaggcgtgactattggcgaaggctcagttatagctgccaatagtgtggttacgtctaacattcctccgcatagcttggcttcaggaaacccggcgcaggttatatcagaaaatattacttgggtacattgatatgaagaaaattataaaagccatattacggttaataagacgttatataaaagattatttgtgtaataaacgtatatacagcgaacagatgagggaagaattctataatatggtgaatgtacccgtatccatgcaaggcgaattatctctttcagagaaacgtgctgtggaagttttatggggtggtattaatccaagactttcatttgcagaatatggagtattcaaggaactttgcggctttgaccctcgctatatgagtcatcagacttatttgcctttagtagcacgtacactgaataattatcgttatacaaaattgtttgaacataaaagtcttttaggatatttagtgaatggcagtcttaagtttcctcgttgtataattcgttgtgttgatcaagaatattataatgaacagatgaatcaacttatgtttaaggacgttgttagtctttgtatccgtgaaaatgtcttgatcgttaaagattcagttgattctgcaggaggaaaaagtgttgagaagttggatttgtctaatctttcagaaaaggataagaaagcacaagttgttcgtgtcttgaatgaacggaatcgagactttgttatacaagaatgtgtgcggcagcatcattcaacagctatatttaatgaaagcagtataaatacttttcggataacatcactttatctcaatggcgtgttttccattttatctatcgtttttcgttttggaaaaagtggtatgaatgttgataattggggaagtggcggaattatgataggggtttattcagatggaacttttcagagttttggttatgacattcaattaaataagtattatgagtataatggtattgtttttaaaaatagagtcatagaacagataccttcattgttaaagcagattgaatgtatacatacatcttgtttctcactttgcaaatttataggttgggatgtatgttttaatgaaaagaatgagcctgtcatcatagaattgaatagttcgcaaccaggtgtatttggtgaacagatctgtacaggacctatatttggcgtacgtacacaggaggtgattgactattgtaaaaagaaaggatttgagtattaagttatggcagaggaaggatcaaataaaacgatagttaagaatacgatatttctttatattcgttccttttttatgatggcaactaatctatatgcctcaagaattattcttcagacattaggagtcaatgactatggactttatggcgcaattggaagcattgtggttatgttcacatttataaatggaacattgtctacgggtacgagccgttttttgacttatgaattaggttttggtaataaagaaaaattaaagaaaacgttcagtgcgtcgtttgcaatgcatttggcattggcttttattttgttagtattaatggaaactgttggcttatggtttgtgaataatgagatgaatatacctgagggccgagagatagctgcaaatattgtgtatcagttttctatactgacatgtatgttcagtttgacacaagtgccatatagtgcaagtgtcatctctcacgagcgtatgaatatttatgcttatgtgggtgttgctgaggctgtttttaaattaatattagtgtttttcttattgtatataccaacaacagacaatttgattgcgtatgcagcaattttggctgcatggaatatcgggttgcaaatattttatcgtttttactgttataagtgttttccagaaagtcatttatccttgtgtaaggataaaagtatttataaaaatatgctttcttattctttatgggatttcattggatcattttgtgcaaatgggaataatcagggattgaatatacttataaacctattttttggagtagcagtcaatgctgcaagaatgattgcttaccaagttgataatgctatactaacattttcaaccaattttatgacctctattcaacctcaaatagttaagtcttatgcggcacataataaaaaaagattttttcagttgatatatgaaggtggaaggtatagcttttttctgatgtcattggtagctgttcctatattattagaaacagattttattttaagtatttggctgaaagaagtgcccgtatggacatcattgtttttgcgatgtattgtttctattgctttattcagaactttcgccagacccatgatacaaggtgttcatgcaactggtgatgtaaagtttttaaatctttcaagtggcttgtttaatgcgcttacttatttgcctttgatttatattctttattggtcgggattacctgtgtggtcatgtttttatatacatacagccagtgctataataagttcatatttagaagcttattcattatataaaattgagaagtatagcatgtggaattatttttttgatgtttatttacgttctattgcaatattgcttttagcatcattgccatcagtgataattgttcttttattagatgcaggttgggaacgattaatatttacaacatcgataagtactatttgtatttttgtatgtgtatatactatggggttaaatagagatgtaaggaggaagattttaatagaagtaactaataaaataagaagcctattatgatcattgaaaacattgattttatttgtgtaataccttaattccgcaacactattacaaatataactttttaagtacctgagcaacaaaaagttgctcaggaatttgccatgtcagatttttcacctatcttagtgttgcaaatcaaaatatgtatcaaacccgacagacatggcaaaggtagcaattaaatccgagaaactcactccttttggaggaatattttcaataatggagcaatttgactccagactctcatctgtaatcgactcaaccctcggtatgagatgcaggctgtatggttatcaatacagcgaaatcatccgttcgcttatgagcgtttatttttgtggcggctcatgcatcgaggatgtcaccactcatctgatgtaccacctttcgcttcatccgacacttcgcacatgcagtgccgacacgattcttagagccataaaggaactgacccaggataacatttcctacacatccgacactggcaagacctacgacttcaacacggcagacaagctgaatacactgctcctcaattgcctattgtccacagggcagctgaaagagggcgaggggtatgacgttgacttcgaccaccagttcatagaggctgagaagtttgatgcgaagcctacatacaagaagttccttggttatcgccctggcgtggcggttattggcaacttgattgtcggcattgagaacagcgacggcaacacaaatgtccgtttccaccagaaggacacgctgaagaggttctttgaaaggtttgaacaaaacaagcttattatcaaccgtttcagagctgattgcggctcgtgttctgaagagatagtggaagagattgctaaacactgcaagaccttctatatccgtgctaaccgatgcagttcgctctacaatgacatctttgccctcagaggttggaagaaagtggaattgggcggcattgagtttgagctggcctccattctcatcgagaaatggaaagggaaggcataccgtcttgtgattcaaagacagaagcggatagacggcgaactcgacctgtgggaaggagaatacacctaccgctgcatccttacaaatgactacgagtcttccgagaaagagattgtcgaattctataacctccgtggagggaaggaacgcatcttcgatgatatgaataacggattcggctggaacaggcttccaaaatcctttatgggagaaaacacggtgtttcttctgcttatggcactcatacgcaacttctataaattcatcatggcgaggcttgacgtgaagaggttcggactcaaagcaacaagccgcatcaagacgtttgtctttaagttcatctctgtgccagccaaatgggtcaggacatcaaggaagtatgtgctgaatatctattcatgcaacaatgcttatgccaatgtgttccagaatgactttggataacaccgacaacttatagtcgtgattttgcgtattgcctcaagtcgcatggtggggtaaggggcatttatatgtctttatggtgacattcgatgcactgtgccccctttttactaacgatgcagattcttttcgcttctgtatcatattaggcgcgtagttgcggatttgaggtaatataaaatttgcagaattaaattatgggaaagtgagaaaaacggaactgtaataatttgaatgaatatgaattgtatttattagtgtgtgaattaagtggcaaatatttgttagttagaattataaacaatcagtatatatattatgatttacatttcaaaaccttatatagaagaacgtggaaatgagatatttcttgtttcaatagtaaaagatgagtcaagaaatctgcaaactgaattatggtattctgttgaaaaacaatacggtcagtatctttgtgacgattatgctgatagttttcttcttgttgtcttggctgttgcaatgcattccaagcaagatataaagattgacgcacctgtttcttcaaggcttcttttcaatgtgcataatactcttcaacctatatggcaaaaggtgcttcctgaaagtaagattataaaagtcttagcagaaactagagatgatattatttataatggaaaaggtgtagggtgtggctgttcattaggtgttgattctatgtcttctttatataaacatatggaatctgatgttgtaaaaggatatggtgtaacgcatcttactatttttaactcaggtcagtttggagattatgatttagagggggctgaaaaggatttcaggagcaaggttgccgcattaaggtccttttccgaagaaactggtcttcctgttattggaataaattcaaatcttaatgcattctataaatattgtggagtatcattgttacaaagttttgtacaaagaacagcgagttgtgccatggctctccagaaattatttggaaaatatatttatgcatcttcatactctgttgaacaatctgaaataagtaccatagatgaatctcatatagaatgtgcttttgtacctttactgagcacaaataattttgaaatgatactttccaatccaggaatgacacgtgtacaaaagactgaatacattagtcgtaatcctttaacccataaatatcttgaagtttgttgggcagatcagacagcaaaggaaatttggcataatacagcttttcttgaaaataaaacaaaaatcaattgtgggtggtgtgataaatgtctccgtaccttgttgactcttgatatagtattgggaagcgttgcggcttacggtaatatatttgaattgtctcaatattattcaagaaaaagagaatatattgttaaagtattccgtgaaaggaaacacaattatttctatcaggaaatggttgaattaatgtttgcccgtcaatattctgtgccttataaagcgatatattattataagaagagtgtataccaagataaaattattatgattttgcaaaaagtgcttggtttacctcaacgtgcattaaataagattctaagaatatttaagaagtaggaatgtgtgcaataaaattctataatggcatagagattccccccatcattatgtctactaactggatggactattctacgatgaaagaggtggtttcagccgggttaaaaactggttttcgagcattcgatacggctcgtgactatggaaatgagcatatcgtaggaaaagtgctcaaagaatgccttgcagaacaaggtttaaaacgtgaagatattttcataacaacaaaaataggtaacgggcagcaacgtttagggaacatcgcagagcagataaacgtgtcactcaagaatcttcaaacagattatgtggattgttggcttatgcattggccttatccgaattattatattgatacttatcacaaaatggagaaagtctatcaaagtggtaaagtgcgtgctattggtatggcaaattatcatgtgcgtcattttaagaaactttgggaggcaggttttgacattgcgcctcattgtgttcagtttgaacatcatccgatgcgtacagctgatgatattattgcattttgtcgtgcgcacgatatagtcattcaggcatattcaccactttgtcgtatgattgatcctattaaaaattcaccaatactcaaagctatagctgaccgtacaggtaaaagtgttggtcaggttattcttcgttggcattatcagcatcagtctgttccttgctttaaatccataaatattaaacgcttggaggaaaattttgacatttgggattttgaacttactggaggggatatggcagctattaattcgatgaattgtgattataaatatcatattgaatcggctagttgtcctggtttctgaaacattagattatgaacataaaaagtaacataaagaggtttataggtattattacattatgttttctcattaagaagacccaatggtatagtagaatatttgtggatacagaacatcaggtatatccggataatacttggtatcgtactcataatgaacgcaattttgatgtagtggtacttggaagcagtggagcaaaatgggcgtttgatttttcaaatcttccgattaaagcaatgaattgggcacaacagcctcaaactttggttgaagactttaaccttttgcgatgttatcattctatcttgtgtaaaggcggtaatgttataattacaataatgccttttacaggacttaataaagaaaccggtctgatggatgctgtgaaatatctcaagatagatactcaaggtgaacctatacaaccctatctttacaaaaaggcatgtcgttatgctaactatccgatattattcggcaaacctgcaatcaaagctctgataaagtttatactgaggcgtgaggaaactattgacagattcgctaaggccatggttcctgtaaatgcaatgaatgcggaacaattggacagggatgccaaaaggtggattgacggatggaaaaggcagttctccatagcggattttgatgctccgttaacccctcagaacatgaaaggtagagaatatcggatttctgttatgcgagatcttgtggatttttgtgttgaacgtggatatcgccctgtgtatgtaataccaccggtaacaaaacatcttgccaagtattatacgcgcacttttgagcaaaattatatttactcttatctaaaggaagtaaaccgggaagtgttgatattagattatagtaaggaaagtgatttgcaaaaagatgaattatacttcaactctttctttttgaatgcaatgggacgtaaagttttcactaaaagggtgttggacgatttacatttagttgaatgttgaggaaacagtttgtcttttagttgaaaatcaatatggttaagaataaaatttcatttttatattctgttaggtatagactggttatgtttgacatatacagattcttgaattatgcattgccataattacggttttatttagcgcaccactctttgtctgctgaataaatttgtctaaagaaaccgctttcaagcggtttcttccaactcttacaaggatgcatactctttcaccgcatcaaagcaagggcatcccttcagcggattcaaatcccgatgtcctacaatgattgcttcgggcaggacagcccgcaactcccggagcaaggccagcagggtcgctttctgttccagtgtccgtgtgtccgcgggtatgccgccggcagacaagcccccttcataacagatgccgacagaatgccggttgtggttcttgcagtgcgctccgattcgctccagcgagcgtccgcggtgaatcccgccgtcgcgcgtgatgtagaaatggtaaccgatatccttgaaaccgcggtggtggatatggtcgtggcggcaggtctcgaaatccaggttccgcccctcgggggtggcggaacaatggatgatgatcaatgttatcttgcgcataccggccggttaaatacaactttgtatacctatgacgctgcctatagcagttgccactgcaatgataactttcaggatggtgctccaagtagattttcttttctgattttccataaaggataaagttttaagtgtgatacattaaagatttagacttccggttcgtttttgctcttcagcaggtctgccacggtttttccttccttttcggcacgcagtgcggcagcttgtgcggcacggctggctacaggttggaattccagtgcgccgaagatggtttttaaatcctctccgggaacatattggatattgactccggtgatatgggcggcggtgaaatccgtcagtttttccgttcctatactggctatctggagacggaacttgcccagttcaccgaaatccacctgctttccttcggtaagggcttccagcagattgtctacagtagcggtgagaacggccaccacatcggcgcgactcacggtagtctgtgaagaaacacgtttgctgagttgtttcaaggtaagttcgccattgatctgtgaggtggcgtaagctttgggagccgcatccttgtccagcggattgggacgtaatgaaacactgtaatttaatgccataatgattttgttgttaaatgattaatatgaattgaacatgacaaagataacacttcggaaaggtgtggatatgaagggaaataaacagacatgaaggtgtgtgacacattgtggcggagaatgaaataaagtgaattaaaggttttgatatatttttatatgtgagctgtttttgttacatttgctttgatagataatctctgtgaataagcttgctgcaaaggagttgtaatagctggatatttacggataatagaaacgttttaaaaaagtgaatgtaatgaacgaagaagaaacgtatatgggcgaatggccggtgaagccttattacaaacgggatttggccatgggatatgcccccgatatcactcctgtggcagcgttgaaccgcctttctgcctggatacaccatcataagccgctttatcaggctttgctcgattcgggctatgcggacagacagcgtattttcaattcggtacaagtggggttgattttccattatttgggaagaccgtaggagttgggcgtccgtatgcttggttctacacgtcagtatgtgcagacctatgcatacgtatgtatcgcctcacacagacgtatatgtgaggcgacatcaccgtatggattaaccattgttactactacattcctcttcgctctcatgctcttcataacgtccgcagggttggcgggtgtagtacacggttcccgtgcggcacagttcctggtcgcgcactttcagcacatccaggcgggtgaaggcacggtcgggttcgtttatacgggtgatggagaggatgaaatcggccagattcgcccaattggcactgccggatatggtgtacatgttgatgtcctccattgcgttctttccgtctattttcttcaggctgcgcggatgagccacgatgattacccagatatggttctcgcgcccccacgactgaaaacgggtcagcatcgacttgatgctttgggtttcggtctcgccttttccactttgcgcctctacaaaaagataagggtctatcaccagatatttcaatggctgcctgcggcgtaccagatcggcccggtgcagaatgtttccgggagtgggcggcacttcgtgcatatccagatgaatcatgtgagtgttcagaaaatcaatatagggtgtcagctgctcgtcggtataggcggtggtgttggctttgcccagcagcaggtgtatcaggtgtgctatatgcttgtccttgtccggaacctcgaaagagaggtagcatacgaagcgttccgtgtcgcgcatgatgcggctggtcaggtcgttcagaaaatccgtttttccgctgttgggcataccggtcatgatgatcaggccgcctgtgtcggtgggatggaaaacgcggtcggtcaaggggccgtagcccacgctgtagccgtggtcgtatttgccgtgcagcacgttcatcacctcttccctgcgttgttctacagtgatgatatcggtggtgtggcaggcacaggcatcttctatgacgctttgcaccacttcggtgccgtaaagattcatcacatcgcctatgtctttgcaccctccgggcagggtggtgaaaaggcagcgtgctccgaagtagtcggacagatgtttcaccagtgtgcgtccgggcaggtcggtgtcaccgcagatcacgatgtcctgcacctggtccagccaggaagtgaatgcctcgaagcttttcgccaggtcgcttgccgctcccgagggcacactgatgacgtggcggtatcctgcttccatcagtaccaacgcatctttttcaccttctacgataatgagtcggggaatggtctcttcctctaccaacagcggattgatgcagtctatgttgtagggagcgcatggtttggtgggcgaatcctgactccagaatttgctgtaggttacgggagattcttccgttgttccgtccggaatttctatctctccggatactgcggaggcgttggcagcggtaacggtctttgcggatggcgaggggctgcatgaacggtacttggcattaacgggacgtccgtccacgtagttcacgtaggcgatgcagggaaagacggaggaagcctgttcgcgtttgtcctcactgttcttggtgatgcagtaatgacgcaggcagccgatatgcgttgcgatggctgtggcgagagagatgccctgatcggccagataacggcgtgctgccagttggtcaggatccgtacactcgggcgattcgtccagcggcttgattttttgcaacacggcgggggataggattttgtagtcgcctggcagcatggggacttcgttcacgttgttttctgtcgcatttcgatattccggcaggttgcctgtgaggtggcgcgttccggggggggggcatgttccggttcgatcggacgacttttctttggggtaagagaacatgggacgcttgtccttgcaataatcagtcaggatgccattgaattcgcatccggcgtagaagcaatgatacagccctttggcttttgagatatacagatgcatggtaccgcatttgggacaccgggcaagaaaattctttcccgcattcttgcggtcgggaaagtccgaaagggaataatagggtttcatgttgaataaattaaaaaattaagaattgaaaattagaaaatagatgccggacggtccgtgtgcagcctcaccggtcattggccactgattgtcagccgtcaatcactaaccattgaggtctacccatttttcggacagcacattccagatggcggtgtgggcagggcgcggcggtgcgtcctccggtatttccacttttccgtctatggggtcgtcatagtagcggatgtccttgtcgggttccttccactcgaaaggggatatgggacggaactcacggagtttcctgcgtttttcctccagatttttgctcagctcgctgctcagccgggcgatggcttgtttcatcagcgactgtccgtggcgcgtcttcatgaggttttgcagccagatgattcttcccgtgtgcgagtttcgggagaagcggggatcagcatcgaagtaagggatgagaaactggtttaccaggatgaccagcccttgtaacgccttggggcgagtatagctatgatcggcggctatgctgttgatgagcgggaccagtacccgttgcttttcttcgggactggtgttgagccggtggaagaaatcggtagcgggagacggggccggtgaagtttttccgttgtcaggcgtttcctgaggaatttccgaagggggccttggagtatccgttttcttcgcgtttggcactccgtttccggcggaacatccctgatgggaatcctccggaggatatatattatttatattatatactatattattattaaaagcagcatcctgcggtgttttccgcgcaggatgctgcggtggttccatcggttttccatcctctttgtgataccatagcggtgagtaaaatgcaatgattttggtgtgcgcctcgtcccatatcattccgaaagactggcagtttgtcactgcggccaccagcgccgatgtgtacgaaaagcggagtgacaaccggaggtcatagaaattgcagagcggatagatgccttgagagttcatgtaagcaggtattcccaggtagagatccagtaacttggtgatggtaggatcgttcactccccgtcttttccactggtggatcattttctgcgtttcgctgatggagacgctttgtttcaatgcttttatagccatgtgcactttgtttttgtaataatggcggtgaagttataaaggaaaaaacagatgcgtctgtccactgtggacagacaattaggagacagacagtattattaacgatatttaaactgaaaaaagatgaaagacaggaatttttctacgaagaagttggccgacagcatcaaagcccttagaaaagccagcggtgtcaatgtaaaggagttttgtaaatccatccacatgacggatcgtagttattacagggctcttaacggtaaactgacaatttgaatttttatgctactatcatgcatcctttggtcgaggactatggcgattgcggactggacgaagagatagaggcggtgaaacgggaatggtggaatgtggtgacggagaactcgtgggagtatctggcgggggagaagaaagagaagttgtgaggggtagatggtaagcggatttaaattatgagaattggaatattgacattgcctctccatactaattatggagggatacttcaagcgtatgcgttgcagacggtgttggaacggatggggcatgaagtttcggtgataactacaccaaataaagcaaaattacctgtctggaaatggccttattcttatcctaaacggatgataaggaaatatatattaggtaggaatgagcacgttttttttgaatcgtactataatcgtgtatatccgattgtcggtcaacatactttacaatttatagataaatacattcattattttgaagtcggaaaattactggatcttaaagaaaataacttcgatgcttttgtggtgggcagtgaccaggtttggcgtcctatgtactatccgactaaaatagagaatgcgtatctggactttgcaagggactggaatgtcaaacgaatggcgtatgcggcttcttttggaacaagcgattgggaatatactgccggacagacaagacgctgtagggaattattacggaaatttgatgtggtaagtgttcgtgaggaatcggcagtggaactgtgtcgtaagtttttgggagtaaatgccagccatgtgttagaccccactatgcttttggatgttcaggattatgtagatttggtgaaaagggcggatgttcctaaaagcaaaggtacattgttatgctatatcttggatgagacggaattgataactgatctgatatcacggttggccgatgagacggggttgattcctttccgtggaaattcacgtgtggatgattggagcgcgcctttggctgagcgtatccagccgccggtggaacaatggttgcgaggctttatggatgcggaactggttgttacagatagttttcatgcttgtgtgttttctatattgtttcataaaccttttgtggttgtgggaaataagggcagaggtttgactagagttaaatctttgttgaaaatgtttggattggagaaggctttgtatagttgtaatggtaataaaaatatagatttaaattgtatagggatagattgggaagatgtaaatagaaggttacagaatttgcgtaagcactcttttaatttgttgaacaaagtataagttattatgagtagtaatccgataatatcaataatagttcctgtttataatgtggagcattatctacctaaatgtattgagagtattttgaatcaatcttttgctgattttgaagtttggttgattgatgatggtagttctgataacagtggaaagatttgtgatgaatatgcatgtaaggatgcccgtattcgtgtggttcataagcagaatggaggggtaaatacagcaagaaaaatggggtgtaagttagcacaaggagaatatatagctttagtagattctgatgatagtttgcctcctctagctttatccgctttatatgataaagctaaatctttaaatcttgacgtagttttgggaagcagtaatgatatatgtaatggagtagaaaggaaaaatttgaatgtagccgaaggcttgtttgataagataggctatgttaaacaattgttgaccaacaaatgtattataggtcctgcgtgtaaaattattagacgctcatgtttggatgtggaagttgcattttctttacctaaaaagatttttcttaacgaggatttgtttatgaatgtctgtattggtttgcaatgtgaaagggtaggcatttttaatgatattatagcatacaattatacggctgataatttaaattcgatatctcattcgaaaacgatgtctgaatgcgaatggatttatttatttgaaagaatcagagagcaattaaaaaaagtcaattcttgttttgaaaattgtgcatctgaatactatgattatatttattatgtgataggcacaagtttctataataagaatcgtttgttcaatgatacttcttttattaaacaaattttgtctgaagatatttataaacataaaggtaaaataagtatatatagaacgatttgtaagcatccttttttattaccagtgtattctttcctaagggactcaattagaaaattattaaaaaaggaaagctaataaaatgcaagcagataacatgtataaagtaagtgttatcgttcttatatataaagttgaaaaatatatagaacgctgtgctcgctctttattctgccagacaatgcaggatattgaatatatttttgtgaatgactgtactccggatcatagtattcaggtattgcagtctgtcatagatgaatatccgcaacggaagtcagatataaaaatcatttctcatgaaaaaaacatgggttccggtgcagcccgtaatacggggcttgaagcagccggtggagaatatgtcatttattgcgatggtgatgactgggtagatcctgatatgtatgagaaactatacataaaagctcgtgaagacaatgctgatattgtgatgtgtgattattatgaggaaaaacgaggtaaacgcatccgttacaatcagaatcctttcaggtataagggtaacattgtggaacagatgctggtggggaagctccattccagtgtatggggggctttggttcggaaaagcttgtatgaggataatcatattcagtttcctgttgggataagtatgtgggaggatttgtgcacttctgtaaggttgcattgtttcgcacatcgggtatcgtatgtggaagaggcattttatcattatgctatttatatgaattctgtatctcatcatactacaatgaagcaattggaagatatgattagtgcatgtttacttgttgaatctttttttaaggagcaaggtatctattcatcatatcatatacccttcttacgtagatgtttttatctgaaaaaagcatttttagtaaataagaatttaaggaatctcaatttgtggagggaactgtggccggagagtaatacatgtttggaggcgtttcaaattagattttatcatcgaatagggtattatttagctaatttggaatattatagattggcaatcggaataataaaatttagtgataaagtggatgattgtcttcgaatgctcataggtataagataatatgcatattatagaatcggattttgaagataccctcttatttaaaattacaagtgataattctttatgtataggttttatatagctgattaaattctcaataaaaaataatagatatgtctggaattgaccacatatttctgtattctttggctttctttctattattgtattttagtattaaaaacgataaatgtcatactagaaaagaggtttttaaattgtttattccttctgctttgttttatgcacttattgaagctttaagatatgatagaggagttgattatttgcattataaagatatttatgaagttggatattttgagggtacacaattgttatttgattgtttaaatgagttattaaaaaacattggttttagttttacaggtgctttgtttgtttatgaaataattttgttatgcggtatttgttttttaatatcttcttattctttaaaggaaggcagatggatgtatttctttgccattctttcgatgttggtattacatgaaaatttgattcgacaatttgtagggatgccttttatatttattgcagtccattttatgtttgaaaagaaatggtcgaaaatgataatagctttgttatgtgcaaatctaattcattcaggtactatttttgcatttccgtttattgctttttcctattatttttttcatttaaaaattaaagctgagattgctttattgttactaagtgtttcttattatttgttgaatatagatgttggatctttattctcagaggtattgcagagaataaattttggagttttgctcttttctgatcatttattgcactatgtagaagagtctgatcgttggttgggtgcggattctattcttgaaggtgctcaacaatctataataaccaaatcttttcaatttatatttgaatgctcaattattatgtcatcatatatagcactttgtttacgtcaagaacaaaaagttcaatgtttttataatattatggtttttgcattttttatgtgtcgattggtgcatggatatgaaatattggctagaatgtttgggcaattatatatatattggtttataccttttggatattctctttatattttttcaaaaaatcaggttgccttacgctcaaaagggtatttaggattgatgcgaggatgtataatcattgcttgttcttatttatgtctatattggggacgttttatttatttaaatcctgaggctgtttttatttggaattgagtattggaatgaaaaaaatatcactaatagtcccagtttataatgttgaggattttgtggctcgatgtcttaatagtcttctagaacaaaatatgtcttatgaagattatgaaattattattgttaatgatggctctactgacagttcattggaaattatacaaccatatttagaaaaatatcctaattgcaaacttattgataaacccaatggaggtttgagttctgcgagaaatgcaggccttaatgtcgctttaggagaatatatttggtttgtagattctgatgattttataatgcccaatttgttagatgatttgtataaggaatgttcttcaaatgatttggatgttttatggatggaatggcgtagggttagtgaattagggatagaattacctcagttttattgtacgtatagaaataaaatatcacatgtaataaatggtgtacaatttatggaacaagtttgttctacatatttatttgcatgggcttttctttacaagagatgttttttacagaaaaattcctttttatttatggagggaatactttatgaagatgtggaatttaatacacgtgtatttccattgattaacagaattaaaatttatagtagaatctgctataattatacatgtcgacatgggtctattttaaactctataagcgagaaaagaattgaagatcttatttttgtttgttttcgcgtacatgatatgtttcttcaaactccatataaattttataaaaggatattatcagattctataattagtatatttttattacttgaaacatcgaattcgagaaagttgaagaatattttctttgaacaaatgaaaacacgtaatattaggactataatatatacagggacattgattagaaaattattgtgttttacttttaatttatctcctcgtttgtgctcacatgtagttcactttatgcttgtaattcgtaaatttttaaaaagatgaatcatatttatcaatggaataaaaaatcgtctccatataattctttaaatatctatgctaaatacttaggtactctaattgaaaaaatatggggaattgagtctacttatatttatccggatacagataattatatagatattataaaagaggctactcaagaaaaatctacatctattatcttttggcattatggtgtttttgatcctaacataaaatatatagaggattattccaaagttgtgtttatataccataatataactcctgctaaatatttttggttgactaatcctctttcatcgttacgtgcaataggaacatatatccaacttttactattacctcgaaaagcaaattggattacggtgagtgattttaatagaatttgtttaaagccttttggctttaaaagaatagaaagttgtccattgataccttacaatgttagcgatagaaaatactctaaaaatacggagtgtactcttttgtatgtaggtcgaataatagaaaataaaaattgtataaatctgcttttgtatataaaacgtttagctaaaatgtacaataaaacaatacggtttattatagttggagaatgtacgactagcaatttttataaaatatattttcaaaaagtattgggagaacttcaaaaaatagataatttgaaattagaatggattgctaatgttgatactgaaaaattacatgagttatatcaatcgtgttggttatatgtctcaacatcattgcatgaggggttaggtatgccggtttgtgaagccatattacacggaacacctgcaatatatatggaatgtggtggacaagaaagtgttttaaattcgttgggtatgattccattggggaatagtaataaatttgcggataaagtattagaattaatatctgatgaaaataaaaggaattctctgttagaggctcagattagtgaattaaaaaagaaagattggcctaaatcacgggctattgtttctgaagtatatggaaagtatataatatcagattaagtttttagacgaaaaatctacttctatttatgccatgaatggtattgattataagtctattttcttgaagttaacttgtaaacagttactatctcttttgcaatctcactccagcattctttgtccagcataaagtaaggaatactttccgcttcatcttccatccgcacgaacaagtgccgcatagagtccgacggggcatattcgtaaaactccagtttctctacccggtatccttttgcacggacttggacaatcactttttgcagttccttgtcggacaggcttctgcctatctcgtaaagagaacgcaaatgatcgctgtctccatagaggtggtcatgaatagatggaaattctgtaaattggctcatggtattcgttgttgggtcacaaaaataatataatattttagaactacaatattcatgttattgaagttaaaaaacgtatccctggtggagaaccgccaagggttggctgctttgccggaaggcaagctcctgatcaatactatcaacgcccattcctacaacaccgcccagaaagacaggctctttgctgaagctttgcagcagggggatgtgttaatccccgatggggtaagtatcgtcaaggcgtgccgttggttggatgcaagatccaaacccacagagcgcattgccggctggaatctgttcgagttcgagatgaacaagctggaccggaccggagggaaatgttttttcatgggcagcagtgaaaaagtattggcattgataaagcggcgtgtaaaggtggattatcctaacatcgaagtggaaacctattcgccaccctataagccggagttttcggaagaggacaatcgggcgatagttgaagctatcaacaaggcaaatcctgatttgctctggatagggatgactgcccccaagcaggagaaatgggcgtacacgcattggcatgaattaaaaatccattgccattgcggaacgataggtgctgttttcgatttctatgccggaacggtaaagcgtgctcccacctggtggcagagacattctctggaatggtgctaccggttgttgaaagaacctcgccggatgtggaaacgttacattatcggcaatctgttgttcatgtggaatatatgtaaggagtagcttgatgaaaagaatcttattgcttgtttttctgtgtagtgtttccttatgggccgatgcccaggcattgctagggactaccggactgcttcatgctcccacggctgatatgcagcgtgataaaacgttcctgtttggtggaaactatttgaatactcatccgttatccacccattttcgtagtagtgaagtggggtataccttcaattattacattaatattactatttttccttggctggaggtggcctatatctgtacattggtacatgcggatcatggctctacttatttcccggaacagtcttgggggaaattcgctaatcaggaccgggctttcagtgcgcgtctgcgtctttggaaggaaggatggtggaaggagtggacaccgcaaatcgtccttggcctggacgatcccacttctcatgccgatcatggtggcggtgaactggtgtctggcaatacaagcggttccaataattacgcgacacgctattatctggctgtaaccaaacatctggatttccggaacgtaggtgaattgggtattcatgccgcatttgtatatggtaatgccaaaggtatggagcgttataaacgtccttcattcggcacaaacttccgttttgcttttcccgaaacatctataataagcaaggttgcgaatggcttgaacctgatggcagagtacgatgcaagaacttgcaatgtgggttttgagtacagcttttggaaagactacatcaacgtcgtagtagaactgaaccgttgcaaatacttctctggtggtcttgtctttaaagtccatctgaaataataaaaaagagcactcggttaggaaatttccggttagattttgtttctttaaagtagcgtgccatgaagcagcagtcattaaagaaatacccgataagcatacagactttagagaaagtcatagagagaaattatctttatatagataagatggactatatttactggatggtacacgatgcttccaattatttatcatcggttctgtattagattcagtggcggaacagtttacgatatcaaatacaagccgctgataaaaattaattcataaagatcgaacatttactataggctgtgtgcaatactgcatgcagcctttccctcttttgttgccggtggcgaccggcatccgcctatgtattgcaaaaacaacagtcttcgtgactaccagcaggaaatgaagtcccggctctttaaggagtgggagtttcatcagagtgtcatggtgcaaatgcctacaggcacaggaaagactcatctgttggcggcggtggtgagagaattcctccaccgttccggtacctgtgtctggatagtggcgcaccgcagggagctggtgcaacagatagaggaaaccgtggcccggtatggaatgggaaaagaaccggacaagtcaggaaagaacggaaggatgaggaaaaacagtatgccggaagaatccggaacggtgaaggtgctgtccatccagtggctgtcacgtaactggaagaatatggaggaatcccccggactgatcgtcattgacgaggcgcatcatgcactggcggagacttacaaagaactttggaagagatatccggaagcgaggaaactgggcatgaccgccacaccctgtcgattgaatggtaaaggcttcaccgatttgtttgatacgctgattacctcatggagcattgcggaattcattggaaaaggttggctgtcggctttcgattacgtgtccatccgtgcagacagcagggagcagcggatgataaattcattgaagaaacgtggggcggacggagattatcaggtgaaggaaatgaatgaggtgctgaaccgccaggtcagcatccggcggttgtatgagagtgtcgagaagtatgccaacggaaaaaaaggaattgtgtatgctgtcagtatagctcatgcccggcagatagccgcctgctacagtgcgcacggggtggaggccgtagctatcgacagcaagactcctgcttcggagcggagggaattggtggagggattcaagcagggacgaatcagggtgctggtcaatgtggatatcttttccgagggttttgactgtcccgatgtggagttcgtgcagctggcgcgtcccacactttccctggcaaaatatctgcaacaggtgggacgaggactgaggaaatcaggtgacaaggagtcctgtatgctgatagacaatgtgggcctgcaccggatattcggtctgcccgtccgtgaccgggattgggaggtgatgttcgagggacggatgatgggcaatgccctgtcccgggtaagaacagaaaacaggctgcccgtgtcctgtccgtcctcggagaatgacaagcgggatgaagagttggaaatcgtgatgacacatggacagttgctggaggttatcaggaaccggaactcgttttatttagaagagaaacaggcagaacagagggcacattccgttctaaaagctttccatgaccggcgtagcggactgtgggggctgaaacgtggaaacagaatgacgatgatgcctcagtatcgggaagtgttcgatatctgtggaaaccgggcggcagttcgtttggaagatggccgggtgagcgttgtggatgactccggaaagccggagataataatagaccgcggccggaggttgaggtttatgaaaggggagctccttggcgtcacgggtgatgacggtactgattcttacatcgacctgaaaacaagccggacttaccgggagaagccggtcgtgttttcttatggtggagaggactatggcaacgtggaattgctgaaggtgggggaaaccttccatagtcgcacgcggaaggcttatgcctctacgcaggggttgcataaggatagtctttgtttttacggtttctacttgaagattcccgactatcgtgttccgaaaaactgcaagttggtggattcggtatggtctacggtttttgatgtttttgcctgtctgctggaaggagatgacgaggaggtgtactggtgttgtggtcacctggcggaccgtagtatcgtggtgatggacgagagtgggaactattatcatgcggaaaaaggaaaaaagaagcgatatataacctgtaatgtacctaaaaccggagaggaggattttgattctgtggtgcagaggctgaaggaggaagccggacggcgcgcggaggaaatcattcggcggcagcagcggaatgcggaggaaaaaagacaacggagactggaggagataagggatgtccagcctttccggatgggggtgaagtgggggcttaaattgggtgaacgtatcgtagtgcctccccattaccggaacatttgtccacccgtcggtggttattgcgcctttgaggaaaatgcataccaatggggactgatggccctggacggcaaggtagtagtggaagccagataccagaaggtggagatagagggtgacggaacggtgagactgactattatccccggtaaggtgaagacgataaaattatgaagaatcccgaactattttctttctgtcaatagattcctttccttttgttttcttgccaatcttgccaagttgtttgtttagacatggctgattataaaaagagtattcttatagcgagaatactctttttttatgaggaataaatagggaatatttatgaaaacatgtaagaaaaaagggcgtgaaaggaaatagttagtaataaaatgcttgctatcttattatatttgttacctttgtgggtcttataatatgaaaaacaatgaaaataacaattctacagagaaatatagaatgggccaatcctcaggccaatgtagcaagggccgacgaggcaataagctgtctgccggattctgatttatttgttttacccgaaatgttttccaccggtttttgtacgcaacccgaaggaattgcggagagcgccgacagcgaaacacttcactggatgaagcgtaaggcagccgagcggaattgtgctattgcaggcagtgtggcggtatgtgagaatggaaattattataatcgtttttactttgtccatccggatggaaccgtgcagcattatgataagaagcatctgtttacctttgggggcgaacacaagcgtttcaccgccggtacggagcgtgtggtggtgaacttccgtggggtacgtatcctgttggaagtatgttatgaccttcgcttccctgtttgggcacgtaacctgggtgattatgacatgatactttatgtggcaagctggcctaccccccgtgtggatgcctggagcgcgctgcttcgtgcgcgggctattgaaaatcagtgttatgtagccggagtgaaccgcatgggagttgatcctgcctgtgaatattcgggtggcagcgccatcatcgatccctacggaaagacgatagccgaatgtccgtggagcagggaaagcgcggtgtcggctgatatagatatggaggcattgcaggctttccggaagaaatttccggtactggatgatgccgacccctttacattgatataaaacaattaataaaataatagatgatggctgaaaagaaattattgttgggcgatgaggcaattgccctcggagcgatacatgccggcatatcgggtgtatatgcctatccgggtacaccgtccactgaaatcacggagtttatccagaataatcctttagcaaaggaaagaaaattgcacagcacttggtgtaccaatgaaaaaacggccatggaggctgcattgggtatgtcatacgcaggaaaacgtgctttggtatgtatgaaacatgtaggtatgaatgtggctgccgatgcgtttgtcaattctgccataaccggcgtgaacggtgggctggtggtgctggctgccgatgatccttccatgcattcgtcacagaacgaacaggattcacgcttttatggaaaatttgctatgattcccatgctggaaccgtcttcccaacaagaagcatacgatatgatggattacgcatatacactatcggaaaaactgaagttgccggtgctgatgcgtgtggttacccgtctggcacattcgcgtgccggtgtggaaatagccgatatccgtgaggaaaatcagttgaatcctgatcatgaacgtgcccactgggtattgctgccgggtaatgcgcgtaaacaatatctggatttagtgaaaaagcaggaaaaactggaagaagcttcctccaaatctccttataattatctggaagggttgaatcccgaatatgattatgagttcggagtgatagcttgcggtatcggttataattatgtgaaagaggcagatacggatggttgccatattccggtattgaaagtttcgcagtatccgttgccggctgacgaaatcaggacgatggaagaccgttgcggatatgttttggtagtggaagatggccagccgtttgtggaagagcaggtaaaagcgattctttcctcagactatgagataaagggacgcctgaccgaaactttgccacgtaccggtgaattgactccggataatgtgggcgaggcgatcggatggggaatcaaacgtccgtttggcaagcctcaggtggtgatgccgcgtccgcctgcattgtgtcagggatgtggtcatcgggatgtgtatgatgcattgaacaaggtggctgcggaatatccggatgcacgcattttcggtgatatcggttgctatacattaggtgcgttgcccccgttccgtgctatcgacagttgtgtggatatgggtgcttccataaccatggccaaaggtgcttccgatgcaggggtatttccggccattgctgttatcggtgactctaccttcactcattccggtatgaccggtctgctggatgcggtgaatgaccgtgccaatatcactgtggtgatttcggataacctgactactgccatgaccggtggacaggactctgccggtacgaacaaattcgaggcgatctgcctgggattaggggtagaacccgaacatgtgcgtgtggtggttccattaccaaagaatatggaagaaatcacccgtaccattcgtgaggaaatagaatataaaggggtgtctgtcattattccgcgcagagaatgtatccagacattgaatcgtaaactaagacagaaaaaagcagataaggcatgagaaaagatatcatactttcgggcgtaggaggacagggcatcctgactatcgctactattataggagaagctgctacggcagaaggcatcaatttgaagcaggctgaggtacacggtatgagccagcgcggaggagatgtacagtccaatctgcgtctatccgacgaaacaatttattcggatctgatcgctcagggtgaggcggatctgattatttccatggaaccgatggaggcgttgcgttatctgccttacttgcaggaagaaggttgggtgattacttctgctaatcctttcaagaacattcccgactatcctgaagaagtggatctgatgagaactttggaaagtcttccgcatgtggtgaagttggaaatagaggatatggcaaaagaaaacagtatgcctaaatgcgcgaatgtgattctgctgggcatggctgcgaagtatattgagatcgtatcaccggaacagttgcgtgaaagcatagggcgtgtgtttgccacaaaaggtgagaagattattgaaatgaatcagaaggcttttgatataggcttgaatgcggtaaagaactggtaatgccatgaagatatttagtgaagaattagtggagaaagcggtgaaggaactgcacatcgccaatcttgcacaggctactatcggtgatgtgctgctggtagcccagtatctggaaaaggaaacggggattccttttatccgtatggatcagggatctcccggccttgcagccaatcagatagggattgaagcggagaaagccgctttagacaggggagtcggatcgcaatatccggctgccgcaggagtacccgagttgaaaaaggaggcttcccgttttgtaaaagctttcttgaatctggaaatctctccgcgcgcttgtgtgcctaccaccgggtcggtggccggttcattcggctcgttcatagcctgtacgcagcgtattccggggaaagacaaggtattgttcattgatcccggatttcctattcagaaatcccagcttcgcattatcggcgtggagtgggaagaatttgatatctatcattatcgtggacaggccttgcgtgagaaattggaaagtttcctgagtaaaggcgatatagcagcgattatctattctaatccgaataatccggcatggatttgtctggaagaggaggagttgcagataatcggtgaactggcaacccaatacgatgtgattgtcatggaagacctcgcttatttctgcatggatttccgtcgggatatgggacatcctttcgaaccgccctatccgcctactgtggcaagatatacggataattatatcctgatgctttcttcttccaagatattcagttatgccggacagcgtatggcattgacatgtatcagcgacaaactgttcgaccgccagttccctgcattagcagaacggtataaagatgcaggggtattcggtcctacactgattgcttccatcctttatatgattacttcgggatgtacggcttccactcagtatgcatacgctgagatgctccgtctgtctaccgaaggtaaaatcaattttgtggaagatacccgcgaatatgcccgtcgtgcggaacgcatgaagaaaatatttaccgacaatggtttccacatcgtatatgactatgatgctacccaggtggtgggagatggtttcttctttaccattggttacggaaatatgacagggggtgaattgctccgggagttattgtattatggagtaagcagcatctcgctttctactaccggtagcgagcaggaaggtgtccgcgcctgtacttccagaatgcgtgaggaactttatccggtgatggaagaacgcatgagagcttttcatgaagatcattgaaaataatgtgctaataggataatgtgccgattgtcatatggtgtgtttgtgcaccagtacattggctaattagcacattgaaaaattatttattatgatttggaacaaaaataaagagtgcatgagccgggacgaaatgagcgctctgcagggaaaacgcctgaacaagttggtgaacctggtttatcatgatgtccctttttatcgtaacaagatgcaggagatggatttatctccggatgatattcagactattgaagacattgtaaaacttccttttactaccaagcaggatttacgtgataattatccttatggacttcaggctgctcctgcttcggaaattgtacgtgtacacgcttcttcgggcacaaccgggaatcctaccattgtgggatatacacgtcgtgacttgtccgtatggtccgaagtaatgtcgcgttgtctttcggcctatggggttactcgtaatgatactttttctgtcagttatggttatgggttattcactggtgggctgggtgcacattatggtgtggagaatctgggggcgactgttatcccggcttctaccggaaatacggaaaagcatgttcgtctgattcgtgacttgggtataaccggtattgcctgtactccttcttatgctctttatttagcagaagtggtggaacgtatggggcttaccaagaaagatatcggcctccgtataggagcctttggagccgagccatggacggagagtatgcgtaaggaaatagaagagcggctgggcttgaaaggctacaatatttatggattgagtgaaattatgggccctggtgtttcctatgaatgccaggaacaacatggttcgcatatcaatgaggatcatttttatcctgaaatcattaaccctgaaacgctggaacgtcttccgaatggagaagtgggagaattggtgtttactactctgaccaaggaaggtatgccgttattgcgctatcgtacgaaggacttgacttccctgatggagggtgaatgtccgtgtggaagaaccaatattcgtatgtcgggtattgtaggccgtagtgacgatatgcttattatccgtggcatcaatgtattcccgtctcaggtggaaagtgttattctggatatgccgcagtttgaacctcagtatatgctggtggtggataggaagaataatcttgactctttgcaggtacaagtggaagtccgcaaagacttcttctcggacgatatgggacgtatgctggcaatgaagaaggcgctgagtgacaaattgaagagcgttctttctatcagtgctgaagtgaagctgatggagcctaacagtattgcccgtagtgaaggcaagagtaaacgtgtgatagacaaccgaattttaaaatgaaaaagtacgcaatatgacaattaagcaattatctgtttttctggaaaacaagaccggaaggataaatgacgtaaccaagacattggcaaagtatgatatcaatatgcatgcgttcagcatggcggaatctactgattttggtattcttcgtttgattgtatcggatgtggaaaaagcggtggaagtacttcgtgccgagaattttgccgtgatgctaaccgatgtggtatgtatcagttgcccgaatgtggctggttctttggctaaagttttggactatctggcagcagagaatatctttattgaatatatgtatgcttttgctcagggagatacggcacatgtggttatccgtccgtctaatgtggatcgatgcatggaaatcttgaacaaactcaattgtaatgttttgactaaaaatagtttgtgatttctttgacatattcattcattttgtagtaatggaaatccggataagtattaaaaaatagtttatcagaatcttttttaaagttagaaagccgcctcctctgaagcggctttctgcttttctattagaacaaactccaagcaactgtcagtccggccattacaatggcaaccatactcatcagtttaatcaaaatgttcaaactgggaccggatgtatctttaaacgggtcacctaccgtgtcaccggtaaccgttgctttgtgaacttcacttcctttaccgccgaaattgccttcttctacatatttcttggcgttatcccatgcgcctcctgcattggccatgaaaatggcaagcacgaaaccggaggacaacccaccaatcagcagaccgatgactccgggaactccaaacactaatcctgtagcaaccggagcgatgatagccaatagagacgggaataccatttcacgttgtgctcctttggtggagatttgtacacaacgggcatagtcgggttcggcttctccagtcagaattccttttatttcacggaactggcggcgtacttcctctaccatgtgggctgctgcacgacccactgcattcatggtcagaccgcagaacaggaatgccatcatactgcccaaaaacatgccgcttagcactttagggttcatcagggttacatcgtaataaagcatgtagtcagtgaaactggcgttatgaacatctacggtaatgccgtttggtaattccagaatggtctgccccaaccgggttaatccgatacggatttcttctacataggatgctaacagagccaatccggtcagagcagcagagccgatagcaaagcctttgccggtggcagcagttgtgttacccaacgagtcgagtgcgtcagtgcgcctgcgtacttctttacctaatccgctcatttcggcattaccgccggcattgtctgcaattggtccgtaagcatcggtagccaaggtaattcccaatgttgagagcatacctacggcagcaataccaataccgtaaagccccatggaaatattggcgaaatcaaacccggaagcaagccaataggataagatgatgcctactactactgccagtaccgggatagtggtggaaaccatacctagtccgataccggaaatgataacggtagccggacctgtctttccactttcggccaatcgttgtgtaggtttataagattgagaagtatagtattcggtagagcgaccgataacgatccctactattaatcccactaccacagcaaaagagatgtttacccagttttccagtcccaaggcccaaaggataaggaaagtggcaacaacaatcagcacagaacttaagttggttcctgtagctaatgaaccgagtagctctttcattcctgcatcttctttggtacggacagcgaaaataccgatgatggagagtaaaatacctacagctgcaatcagcataggcgcaatgaccgctttaaactgcattacagtatcatccgaaccaatgaaggcagctgcgcccaaagcggcggtagccaggatagaaccgcaataagactcgtagaggtcggcgcccattccggctacgtcacctacattgtcacccacattatcggcaatggtagcaggattacggggatcatcttccggaattccggcttccactttacctaccaggtcagcacccacatcggctgccttggtatagattccacctcctacacgggcgaaaagtgcttgcgtgctggctcccatcccaaaagtaagcatggtagtggtgatgacacataatttggcggaaggattcaaggtatctggcggaatacaataatccaataatatataccagaaggaaatatcgagcagtcccaacccaacaacaaccaatcccataacagctccgctacggaaagccacgcgcagtcctttgttcagagagtgctgggctgcattggcggtacgtgctgaagcataggtagccgttttcattcccaaaaaaccggaaagtcccgagaagaaaccgccggtaagaaaagcaatgggcacccacggattttgtaagttgaagccgtatgccatgatagaaaacagaataactaatcccagaaataccagccctaccactttgtattgttgtttcagataggacatggcgccctggcgcacataagaagcgattttttccattgtcggagttccttcgctttcaagcatcatttgtttgtagaaataccatgcgagtgccaatgccaagagggaggcaatgggcacaatccagaagagatacgtttccatacgcagtattgatttaaaagttggttttgcccaaagatagaaaaaataaatgatattcaataggataggcaatatttttatcaattaatatttgcggtacttttctaattaagtttaggggaaaataaatatcaatatctgtaccttggaacacatagacctgtttctgtgtttcatcaaaacacgatgaaagataaataagactttaaaaaacggtttcaccacagattgcacatgatctgtggtgaatttgatacattacccttttatttgccatacagcttgtctatcaaatcagcgcgtcctattttgcgcaattcgttgatgatggcacgccgttcttcgggtttataccaaaaaaagaacatccgttgagccagtttctctttttgtgatttggcagagaaaaccggttgtaacgtatatggatgataacctgtgtaccaggcttcagtagctacagtcattggggtaggggtgaaatcctgcacctgttccagatggaaatccaatttcttggtgatcactgccagttctgccatatcttcttccgtacatcctggatggctgcttataaaataaggtataatctgctgtcgcatattcaattccttatttattttgtcgaaagtctttttgaagtcataaaattgcgaaaacgaaggtttcctcatgatttgcagcactgggtcgctggtgtgttccggagccactttcaaacgcccgctgacatgattggctatcagttcgcgggtatattcagctgtactgcggtttactgccggatccttactctgatattgtaacaggtcatagcgtacaccgcttccgataaagcttttcttgataccgagaagtgcgtctaccgaatggtaaatatccaataaaggacggtgatccgtgttcaaattgggacatactttgggatggatacatgacgggcgtttgcagcggcggcatattttttcttctttaccgcgcatagcgtacatgttggcgctaggccctcccaagtcgctcagatagcctttgaagtctggcatttctgttatggctttcacctctttcaagatactttccttgcttcggcttacaatgaattttccctgatgggcggaaatggtacagaaggcacatcctccaaaacaaccacggtgcagattaactgagaatttaatcatatcaaacgccgggatacgttttcctttatacttgggatgaggcatacgcgtatacggcaaatcaaaagaacgatccagctctccttgtgtcattggaggataaggcggattgactactaccgttttgttacctacatcttgcaagatgcgggaggcttcgtatttattgctttcctcttcaatgaagcggaagttttcggcttgtttctttttatctttcaggcatgtttcatgagaatggagcacgatatcgggcttttcctgagtgtcatcagacggacgcatgggttcgcccttacgggttatgtaggctgtttgcaaaatatcatgtggaaccggaagactttctgcaggagcagattcatggggctgtccgatggcgtccgccaatgtcttcattctcttgcaaagttccgtaatcggcttctcgcccattccatagatcaataaatcggctcctgaatctatcaggattgatttacgcagacagtcttgccaatagtcgtaatgactgacacgacgcaaagatgcctctatacctcccaaaatgacaggtacatcgggatagatcttttttaaaatctgtgtataaacgatgctggggtattcgggacgcatgtcgtggcggccgtcgggagtataagcatcctcgctgcgcaaacgcttgttggcagtgtatttgtttaccatgctgtccatgcatccggcggacacaccgaaaaagaggcgtggacgtcccagcttcttaaagtcgcgcaggtcgtcacgccagttaggttgaggcacaatagctacttttaagccttgtgcctctaataatcttccaatcactgccggaccgaatgaaggatgatctacataggcgtcaccgctgaacaagataacgtccagttctttccacccacgcatttccacttctttcttggttgtcggcaaccagtctgtaagtttgtattctttcaatgatacgtattgttttttattttgctacagagataagttagttatatctcttcttcatccttatttttctccttctcccattggatataaagcagaataagttgatgaagtccgaaagctttcatgttattatgataaattacatcaatgcaaaggtcaagcagttctttattatttccttcctcactggttatcagtgagcggatattcagcttcagtttgtccagtaccgactcgtccacgataccgttactatctattagatgttgaaataaagcatatttctcaatagtttgcaggttctcttctgagatttccatgctacgtgtgccagaggcgttagtctgtatagtgtacatagtcgtttaattttaatggtttatacggacaaagttaggcgtttttatgaaataacctcttatttgttcttttattttcgtttaaaaatatcacttgctgccgaagaagcccagaatagcactcattacccgtgctctttccttcactccttgaatgctttcaaaagggaagcctagaacgaaggtacgataagtacctttgtaggcaatgccagcactgtaatttcccggattgtaaacgaaagtagagtaagccggagccaccggagtcagacagtcgggagcgggtacggcataggtttgttcattgatggtgcgggggatattgaaacgggtgccggctccgtatatttctcccgaagtggagttgagcatactgcctccgaaactatattttaatatgttttcggtgaagttcagtgctgtgggactgttcatgttacttcctatatatgaaccgctgagtatcaggttgccgcctttttggcagtaggaggtgatcagctgctgtagggtgttggagaagggacgtctgtcggctccgaatatcaggtctgcaatggggtaatctgccagccggacaaaaccattttcaacggcttcatcactacacgacacaaaagagtaccctccggttgcctggatagctttaccatgaatgaacggatagtcgaaagtatttccggctatcaaccttccttccagctcgctgccgctataccccagcccgtctttggtttcccgccctatgcggctacggtcgaagctttgttgcgttccgcagaaggcgggcgtatttatataaggtatccccggatccgtattcaaatcaaagccttgcaagaaaggagattctacggtagcaggtccgctcagacggtcgaatccattgactatcaagattgttcctttgcttttctttgcctgataggctgacaggatttcggaaggaaaactttctccccccttgttgactgcggtaactttaaaactatataccagtcccggttcggcttcgaagatatattcagtaccgcgtactaacgttccattatcaaatccaccatgtcccaggcgggtgtagacgatgtattgttgtgctttggcagtcggttccaacggatcgtctaccgcttgccaagttagtcggaaggtgttttttctgcttccgggatgaatggcaaaattacttaccggtaaaggttggactacataatccgttccatgcatggtactcagatattttagtacagatttgtaaacagaacgccctacggtaaacttgaaacgcggatcgtgtcctagtttcaaatcggcaaagttctgatgggagaggagttccagaatcatcgagggaacggcaggcagacgagtttcgctgtaattgcggttccacaggctgcgacgttgccaccggataccgaattgggcggagatatcccgttgcaggccggtcaagaccatatctgccaaatcacgggaagcataacgggagatgccggcattcagttcaccgttattataatcggtggtataaatacccagcgtgcctactaaatcatcttctttggaaaaacctgcatcgctgtgcactcccaaggtcatttcaaaaggaacgcccaatcccttctcctttggattgtacacagaatttccgctgagataattgattatccggctgcgggcgtttatatcgtcggtatagtcattcttaccttcactgggactgtaaaccggatagggaaagcccgaccattgtgcggcgtagcgtgccccttccaggtagcggggcaggccgctggtttttccaccgcgcgatatgtttcccattcctccgccaaaacggacagcatcggcgcataccactcctttttgtctactctcattacttaataccaccatgccgtaatcgttggtccctttatcaaactcgaaagtgcccagataaacccaggtgcctccccctatttgttgattgactagaaattcagtgacaccccctttatggaaaaccagatatttggcgttactcacacttccgggtaaagtctgataagtcacatagacggcatattttcctgtttcgggaatacggggaatccattgtgcaaaggctttttccggttttttctcggtggaggcaaagcgggctgtaccttcttcaaaaggattttgtccgtccctgtaaatcaaccgtttttgagcgaatgccggggtgggggctgttttccatttacctttccggctttttatctcctgatagatgcaaccttggggatgaatgtcattatccacaatcacttcattgcgctgccagtcacgttcacggggagtatacactatggctcctgcattttccagcatgggtataatataaggtatgacgaatgattgggtgaacaaatcctctgtggtacagaacaagcgtggacgttgccattcccaacatcctttgtcattcttataatattttccgtggctttgccaaagggcgatgtgtctgccttccaatcctttgctggcagtaaaggggcgggaattattttttacccatggattacctttataatctgtccgttgccataagcggcttttgtcctgtttctttctcagatagttgggaaccaggtcttcgatggattttccatcggcataaatggttatatcgtaataatttacagggccgggtaagctttgtttgagtaaccggtagatggcttccgtgttttcgggtgtgaacggttggtagccgaagctggaactggcatatacgtccagtttcttttggttatgattgacttcataacggtctaatttgcacttgcctatgttggcgtaagatgtttcatattgggtgaagaaatcttttagacgttgttccacattagcgtctaacccttgtgccaaagtgtgcgatattcctaccatcaccagcaggaaggacaaaaatatctttttcatgttgttttcttctttatttatggttgcgaagttaggaatttttgttagttttgtcattctaactaacctataatgaacctaaatgaaacgaattatctttaatttctgcttcgtatggctcgctgtttccacttttgccggaagtaaagtagtcgaaatgcgaaattatggtctggtaccggacacacacgagaatctttcagctaaattgcagaaggcgttacaagacatcaagactcaagtcgcttccggcgataaggtcaccctgctttttgaatccggacgttacgatttccaccctgaaggggcggctgtccgtgagtattatatttccaaccatgaccaggataatccgaaaacggtaggttttcctctggaggattggaaggggctgaccgtggacggacaaggtgccgattttatctttcatggccgtatgcttccactttctctgcttcgttcagaggattgtactttacgtaatttcagcatagattttgaaactccccacattactcaggtcaaggtgttgaaaagtggagaggaaggaattacttttgaacctgccgcatgggtgaaatgccgcatcaatgagaaaggcttctttgaatcatacggcgaaggctggtccagtgctccccagggagggattgcttttgaagaaaagacaaagcgtctggtataccgcactagtgacttatggtgtcctatggaaggggtgaaagaagtttctccacgtgtctaccatgctcctcagtggaaagacgcccggttgataccggggacagtggttgcacttcgtacttattatcgtcctgctccgggtatattcttgtccggtgacaaaaatacttgtttgcagaatgtgaaagtgcattatgcagaaggtatgggattattggctcagttatgtgaaaatatcacgttggatgaattcagcgtttgtcttcgtggcgataaggatcctcgttattttaccacgcaggcggatgctactcatttctccagttgcagaggcaagattgattcccgcaacgggctgtatgaaggaatgatggatgatgcgattaatgtacacggcacttatttgaaaatcaagcaacgccttgatgaccatacagtgattgctcaatacatgcatccgcaagcatacgggttcgagtggggagtgaacggagatgaggtgcaatttgtacgttccgtcaccatggaactggccggtggaaaaaaccgggtgaaagaaatcctgcctaacaataaagatacggtgaaaggtgcgaaagaataccgcattatttttacggaacctttggatgcggagattacggataaagaaggctttggtattgaaaacctgtcttggtgtccggaagtttattttgcggataatgtcattcgtaataatcgcgcacggggtactttattcagcactcctttgaaaacggtagtagagcgtaacctgtttgaccatacttcggggacggctattttgctttgtggtgattgcaatggttggtttgaaacgggagcttgccggaacgtgctgattcgtaacaatcgttttatcaatgcattgactaatatgttccaatttacggaagctgttatctctatttatcctgagattcccgatttggagcatcagaagaaatatttccatggtggaaaaggagaaaaaggagtggtgattgaagacaactattttgaaacctttgaccgccccgttctttttgcaaaatccattgacggattggtctttaaaaacaatgtgatccgccagaatacagattatccggctttccatcataataagactcgtttccgcttgcttcacacccggaatgtgaagatagagaagaataattttgaggatggggatgagagcgtggtaagagaatagatacaatgacactgattatgcggattttgttttaatccgtataatcagtgttcccttatttaaaaagaattataacagacggggattattctactttcccgatgctgaaattttcaggatatttgcctttgaaattcttgtaatacaacttgatctcacgcatatccttgtccaaatcaccgctgggatgtatcaccttttcggctgtaatgcacttttttgcgtaatcgatggctaccagaataataggcagaccggccccttgtgcaatataatagaatccttttttccagttgggattggctttgcgtgtcccttccggagtgatagccaaatggaatttttgactcgatttggcaatcttgatcatctggtccaccaatgaagtcttgcggctacggtctacgggaatccctcccatccagcggaaaatagggcctagaggccagaagaaccagtcctttttcatcataaaaccagtttcgcggcctatagctcccataaacagtttgcctatgaataagtcccaattggtggtatgtggggcggcacagataatatatttatcataatcgggagcagacaccttggtcttccatcccaacagtttgtagtagataaaactacaaatagcttttttcattccttaaatcttatgcttttgtagctttagccagttcgtctgcaaccactttgatttctttgttcagatcttcgttcaatttcttgtagaatccttttacgttacccggctcggtgtggctgatgcgtataatcagtttgatcacattgtgtacagagttgcaaaccacttcacggttaacaccttccatcaaactgactaaaaacaaatcacttgctatattggttattttcttctttaaatttcttctacttgccataaatgtaatgttttaagttaatacataattctaaattcgcggtaaaggtagcatttttatttgtatacgttttcatatttgcgaaaaaagagcgaaatttgcacgagaatactaaatgaaattatacacctttaaatagaataatagaatatgactaaaagtgcattacaaattgccagagctgcttatcagcccaaacttcctaaagcgttgaaaggcgctgtaaaagtaaaggaaggcgaacctacacagtctgttgctgaccaggaagccatcaaagccttgttccctaacacttacggtatgccgttgattcagttcgttgaaggcgaagctgtcaatatgcctgctatcaatgtaggtgtcattttgtctggtggacaggctcccggcggacacaatgttatttccggtttgttcgacggtgttaagtcattgaacaaggacagcaaactgtatggtttcattctgggccccggtggtttggtagaccataattatatggaactgacttccgatattatcgacgaataccgcaataccggtggtttcgatatcatcggttcgggacgtaccaaactggaaaaggaagaacagtttgataaaggtctggaaatcatcaaggaattaggcatcaaggcattggtaatcatcggtggtgacgactcaaacacgaacgcttgtgtattggcagaatattatgctgcgaagaactgcggtgttcaggtaatcggttgcccgaagactatcgatggtgacttgaagaacgagatgattgaaacttctttcggttttgatacggcttgtaaaacttactctgaagtaatcggtaacattcagcgtgactgtaactctgcccgcaaatactggcactttatcaagctgatgggacgttcggcttctcatatcgctttggaatgtgctttgcaggttcaacctaacgtatgtatcgtttcagaagaagtggaagagaagaacatgtcattggatgatgtggttacttacattgctcaggtagtggctaaccgcgctgcacaaggtaataacttcggtacagtgttgatacctgaaggtttgatcgaattcattcccgcaatgaagagattgatcgctgaattgaatgacttcctggctgctaacgcatcagagttcgcattgatcaagaaatctcaccaacgtgaatatatcatctccaagctttctaaggaaaactcggaaatctatgcttctctgcccgaaggcgttgcacgtcagcttactttggaccgtgacccgcacggaaacgtacaggtatcattgattgaaacagaaaagctgttgtctgatatggtagccgttaaattggctcagtggaaggaagaaggcaagtatgtaggtaaatttgccgctcagcatcacttcttcggttacgaaggacgttgcgctgctccgtcaaacttcgatgctgactattgctactcgttgggttacaccgcttctatgttgattgccaacggcaagaccggctatatgtcttctgtacgtaacactactgctcctgccgaagaatggattgcaggtggtgtgcctatcacaatgatgatgaacatggaacgtcgtcacggtgaaatgaaaccggttatccagaaagcgttggtaaaattggacggtgctcctttcaaggcgtttgccgcacagcgtgaacgttgggctattgaaacagactatgtatatccgggtcctatccagtacttcggtcctacagaagtttgtgaccaggcaaccaagacattgcagttggaacaaggaaaataattctttcttatttctataaagcataaaggaaacccatcggggctgattgtaaaaccattctcccgatgggttttattacatagtatgtgggaataggtaaaggtaaaaacagctaaataggataaaatggtaagagcgaaaagcacacgtcctgctcccgttaaaaagaaggcagccgcgaaacctgtccgtcgggctacacagcggaaggcgcaaaagaaaccacaaagacagatgccgtcatggcttcggtatgtcattgcggggcttattgcttttttattccttgccgctttcttttatttctttatccgtccttactcttaccgctggaagccttgctatggctttaaagcatacggtgtatgtatgccctcgggttttcaggtgcatggcattgatgtttcccattatcaaggaaacatagactggaaaatgctgactcagacccgacaggggaaatttcctattcattttgtctttatgaaagcttcggaaggaggagattatggggacaaggcttttatcaccaattttgattcggcgaaaacacatgggtttatccgcggggcttatcatttttacaatccgaaaacagatcccatccgtcaggccgatttctttattaattccgtaaagctggattcaggtgaccttcctcccgtactcgatatcgagaagagaggcaaggacgaaaatcagctccgtcgtgaccttaaactgtggcttgacaaaatagaacagcactacaaagtgaagcctattctttatacttcttataagtttaaaactcgttatctgaatgattcggtcttcaattcttatccttactggatagcccattattatgtagactcggtggaatacaggggagaatggaaattctggcagcatacggatgtgggtacgttgccgggcattcgtgagaaggtggacttgaatattttcaacggttcgttggaggaattgcaactaatgactataaagaaataaaggatactgtgcctgcggtttcgaaaactttctttatatttgctttatgaacttactgctcaatattatttggctgatttgcggcggatttctgatctgcgtggaatatattgtttccagcctgttgctgatgatcactatcgtcggcattcctttcggtttccagactttgaagttgtctatgctggctctttgcccttttgggcgggaaatacgcagttgtcccggtgatggcggatgtctcagtgtgttgatgaatatcatctggatacttgtaggtggaatctggatcagcctctctcatttggcattcggggtgttgctttgcatcactgttatcggtattccattcggactgcaacatttcaagctggcgggcttggcacttactcctttcggaaaggagattgtataaatattgtataccgatatgatcgtgttgtcactttggataaaatgcagcgtcctacgtgcgtttgtcaccacttgattccggttctaattttcaggtaagaagaacaaaaggacaaaagagagaaaatccgttcttttgtcctcgaataaatcaatgtaaatcctgtgtgattggtggtaatcctgtctttatcaagtccttttcatacttaaaaatggtattatttcatgatgaacttcacagctgcccagttgttcttttcccgatggtgtacgaactccattcccagactttccgctttttcgcggataaaaggaatatcctgcatataaaatccactcataaatatttccgaacccggatgcatacaggcggcataatgaggcaggtctgccagaagaatattccggttgatattggcaataattacatcaaacggcttgcggcctttcaacaagttggcatcccccagttccactgtaatgttatggatatggttcagtgcaatgttgtcttttgaattattgacgcaccagtcgtcaatgtcgatggctgtcacaggattggctccgcgcatggaggcaaggatggcaagaatagaagtgccgcatcccatatccaagactgattttcctttcagatcagcttctaacagctcgctgattatagagctggtcgtttcatggtgccctgtgccgaaagccatttgcgggttaatcagaatttcatactcagtcttcggggtgtctttatggaacgtgctgtgaatgcagcaacggtcaccgatgacgatgggttgaaagaagttcttctcccattcctcgttccaattcttgtcttcggcttctttaatggtatatttcacagtagtgtcgggcagggggaagctcgcaatcatttcttttaatgcttcctcatcgaacaaagtctgctggatataagcctgtactcctgcttcacattctacaaaactttcaaatcctatttttccggccagtgcagatactacatcattcactgtttcattacagggatgtgttgtaaaggttacttctaaatatttcatacgttttcgtttattctatcactttacggagcaatgcctccatctcatttttgaaaatacccgcttcatgtactttcacaccgtccacataaaacgtgggaacgtaataatagtcgtattggtcggctatatcaggatgttgggtttcttctatcatttctatttctataggttggaattcagggtgttcttcttttagttcttcaatatagcgcagtgcttttttgcagaacgggcatctttcctgataaaataatttcactggtttcatgtggctgtttattttaggtttatatactcttaaaaagggtagtggcaaagatagggagaaaaaatgagaataagagcagaatcggtattaattgcttctctctttatacccgttcagcatctatttattttcttcattccggtaggatatcaacaggaagttactctcaataatgctctcatactctcattagtggtataattcgcttataatgagtgtgctattgatgatggtaacataaatgagtatgagggcattgacctcatactcatttcttgaaaaataaattattccaacttgaccacgtggtataaagtacctctgatactggctcttttgggtacattcagtttatgtagaatacgtccgaaccaatttattttattgacggatagcttatcacgtgtgttttcttggagataattgaaaatctccatggcagtcagccattctccctcttcatcagtggtagcagaagaaaaattacaatggaataaatgttccaaaggcgaaatttgctcaaattctctgttgctatgccgcaaaacagcctcatcttcatcattcagccagtaacgttcctgctgataaagcaatgtcatggcttgtgcatagagctggcggtagtctatggtgacatgggtatcaatgggagcggtcacctcgatacagataaagcgacggcttcccgtggggtcggtgagcaaatccttctgattgctggtgccgatgaatgaggcatagcggcgtaattcgcgtacgctggttccatagggctttcgcaggttggccaccggtttttgtaacagatgtttcagaaaaccttgctggttcatcgtaatctggtcgaattcgtccaggttgataaggaaaaatcgtcccaaggcacgctccgcttcctgtttgctgctgaagtccaggctgtcggcatagccgaaacgcagttcgggcggtagcaggatgcggcagtaagtggatttccggaatccttgtgaacccaccagcaaaggcgaagtactgttgccatgctggcggtccatccccctccaatgcgccaccatgcccagaaaccaacggtaaaagagttcttcccaatgcggattgccacagggaacgagccgggcaagtgcgcggatgcggtcagtaccgtcccatcggggaaggtcacacaagtattcttctacgggattgtaaagagggacgaaatcggaagtgagaaagcggtcgatatcgcggtcccacacttgcagtccctctttcaaggtgtaaagggcgatgctgtttcgggtacgtttttccaagggtttgaaatagaaatgaacagagtcccgctggcggtattccacctcgtccagtacggtgttgaaacggaattcgtaccgtcgtttcaaaaactcctccagccggaaggtggcttcctgctctttgttgaggccacctttctcgccaaagcctttcatctcccgatatccgttgccgaaagccatgcggatggcttccgtgttcgtttcgtggaaatagtgcattagtgtacgccgcacggcttcttcttcggggatgcctgctttgaagcattgttctaccagatggggcagcaagggttccagtccgtcatcacgtttccagttttccatttcggccaatgctctttttcgtgccgattggtacatcagtgtcaaagtctgtaaactttcacatccgggcgtcattcgttccagtgcggtttcgctgttttgtttgcgttggcggaaagactcttcatcgggcagggcaagcggttgctctatgcagaaggggacggacgaagggttatagtaaggttgttcatccacggtcatgcggcagctttgcatcaggtccggttccttcagtgtgatgccgaaaggaagcatgggctggtagcaggtcaccgccagccgataggcgtgagcatgaaacaggagagcctcctgtatggtgggcagagtgccgtcggggcgtgcgaagcgtacccatatctttacgctccgtccgcttgaaccgcagaaagcggcaaaggtctgtggcagttgtgctacttggcgtttcacatattccacctcatacaggtcggccagccggttcacttccagctgcactagtccgttgtaatgtttcatgcgtttctcgccattttgcttacgggtatattctacagcaggatagacacgcggcagtttgtcgatatgggcgtagtgggcggacgatcctgtcagccggggcagtatttcacgcagttccgatatgtgtcctgctttgttctctgtctttattttctcgaggaatgcgtccgaatcgcatagtgacaaggcttctgtcccctgttcttcatctttcctgatgagtgtaattttcatatttgtctttcgtttaaatgttttttggctttatgtacctcccatggaaaaagatgatgttctgtcgtgtggagaagaccgcgtttggcgagtgtctatgtgtgcatatttttagtaaaggtaaggtttctttccggattctgcaagtgctttccggattaaatgccgttttttctttttcctttctttcctgtgtttttattcttagtctcagtgcgtatttccctgttccttatttgttttctaccttttcttttcttatttttgtatgtttataattagttagccacccttgtgattaagtctagtcacaagggtgattaaagttaaccacaaaggtagttaaacttaatcacgtccgtgattaacagatattgaaagttcattaataaaagaagaacagtatggcaatactatttgattggtacgagaatcccaaatcacctgagcaacaaggggaagagaatacgttgcacccgcgtctccggctgaacggaaaggtgagcacggcccagctccgtgcccgtattcagaaacattgtacgttgactgaaacggatgtggtagccgtgctcgatgcgctgtcacgtgccatgggcgaggagttggcggaaggcaaacaggtgcatctggacggcatcggtttcttccgtcccaacctggtgagtaccgggccggtaacggaaaagacgaaacgtaagaatacgaaggtgaggctcaaggggattgtttaccgtcccgatcaactattgatggatgaggtgggaaaggtaaaggtgcagcgtacccggttctcgtttcattccagtaaactgaccgatgaggagattgacgcattgctgacggagtacttcacaacctgtgattttgtgcagcggaaaagtttccagcttctttgcggtatgacacaaagcacggccagccgccatttacgccgcttgtgcgaggaaggaaagctgaaaaatgtgggacttcccaaacaaccggtttataagccgataaatgggtattatgttgtgaatgaatgatttaaagtgagagaagcaagaaattaggagtgagggcatgagggcaatgctctcactttttaacatgccctcactgtgggtagtggtttaataatgagtaggttatggcttttagtgagggcatgagggtataagtgggtgcaacttattataaaaagttgttttaccaccagatttgtttaccatcaacgtatgtgaacggacgttcttctgttttccgtgtgtgcagaaatagataaaatagttgaagtccgttactaaaatagggaaatccctaccaactaatagggattttctttgttatgaactgaaacctctggctatctttgcactagaaaaagtagatagaataacaaataaaacaggtacgagtatgaaaaagattgtattaacttcgcttatgatggtgtgcttgccttattgggcaatgtcacaaagcgttgatgacgacctttatttcatccctaagaaaaaagctgaaaagaaagaggaggttaagcaagaggtgaaagtggtggttccgcagaagcagaacacgactactgtttacgcagcccccggttctacagtggtggtgaaggatgtgaaaggaaaggttcgcgatgtggatgagtataatcgtcgttatacttcacgtgataataatttctcgatggagaatgataccttgtatattgaggagaaacctttgaatgagagaggagaatgggttaatggttttgagggttctcaagacgattatgaatacgcgatgcgtatcgtccgtttccgtaatccccgttacgccattccggtaagcagtccgctctattgggatgtagtttacggtttgccttcatgggattggaatgtatatgatgacggattgtatgcatacgtctttcccacttacacgaaccgcttatggtgggattggcgttggaattatccatatggcgccagttggggattcagttggggatggagttcgccatggtactacaatagttggtactatcccggttattggggtggcggctactggggtggctattggggctaccattatcaccatcaccattattatccgcattacttcggtcacggttggggtggtggctactggggaggtagtcatggatggtatggctcaagcagacgtaacccggggatacatgccggaagatataccaatagctatagttcttcacgcccaagccggaataattacgtgaatagttatgataggaatagtcgtaattcatacgtaggaaattccagacaaaatgtccgtaatagtgctaatagttatcgtaccgcaacacgtaacggttcttcatcaggaagagtggtttcgggatctaacagtgtaaattcggttcgtcctaatagaagtgctatcagaacccgtaccggagaaactctttcaccaaatcaggcagcaggagttcgtccgggtaattcgtattcacgtccgacagaaggaaggggttcttcctataccagaccaagcagtactcggagcagtgtgggaaatgcagcaggatctgcttatcagagaacaggggctgcaagtcgtggcgcttatcgtaacaatagtggcgtttcgaattctcgtagcagttcatactctcgtagcagtagtccttctcgtaatagttcgtctaactcttaccgtagtagtggaacttcttcttcccgtagtagtttttctagtggcggtggtgcttctcgcagttccggtggcggtgtttcccgttcaagtggtggcggcagatcgcgtaccagataagtggtagattaaactagacagttgaatttaatagaattgatgtatgaaaaataaagtaatagtaaccgcttgtgcgttgttggcaatgacaacggcaagcgcacaaaatgcttatgatgcggaaaagttgctggggaatgacttgaatggaacagcacgatttgttggtatgggtggtgccatgggagctttgggcggtgatatatctgtcataagctccaaccctgcgggtatcggcatttttcgtagtaatgacgtgtctatttcttttggttttaataatacttcgacaaagagtaactttagtggtgtgtcaatgaatgaaaacaaaacgcgcgcttcatttgaccagattggatttgtttatagcaataagataggcaataatacttctttgcgttttgtgaatttcggattcaattaccataaaagtaaaaacttcaatcgccttttctctatgggaggggcgttggataatttgtcacaaagcttccagctggctcaggagatggaacgatatggattgacggaaagcgagtttaatgacatactggatgtgaagaatccttataccaaatattggaatcagttacctgttttaggagtaatgggggtgagaaccggtgtggttgactgggttaatgattctgaaaagaatattcatgctccatgggggtggaatggttttaacaataacttctttagtaaggaaacaggaggtatcagtcaatatgattttaatgtttcattcaatattgaagatagggtctatttaggagctaccctgggggtctatgatgtgaattatgatcgttatacttcttatacggaaaatttgaatgatgataacggtgcggataatggggggtatacattggataattattataggctggaagggactggtatggatttaaaattgggtgttattatacggcctatagaaagttcccctttccgtttgggatttgctgtgcacacgcctacatggtatgatttaagagaaagctataatgccgctttatcttctaatattttagcttgtgaggcaccctataaccagacattgagtgattttttggtaactccggaatatgattatttgacctatgattataatcttaccactccgtggaaatttaatatcagcgcaggtactacttttgcgggtgcagtggcagtaggtgcggaatatgaatatcaggattattcttccagtaagctcaaggatgtggatggttatgaattgggagatcagcccagcgttgagaattatttgaaaggtgtccatactttccgtatcggaatggaaacgaggattatacctgagtttagcattcgtgcaggatataattactcttcggctgctttttctaaagatgcttatagtgccttgtctttatatagcacgcgtactgattttaataatacggagtctaagaatacatttacgtttggtcttggataccgtggcagtgtaatttatgcggatttggcatataaatatgatatgtataaatcaaacttttatgcttttgatgatatagatcttccggcaactaaagtggacaatgaacggcatcagttgcttttgactgtcggtgctcgtttctaagaattaattgtgagtctaatataattaacttgtgatataccgggaatgctttattgctttccggtatattttttgctaatgtttcatcctggttttcaaacaaaagggttatctttgtaaaaagaggtttttatggaacagaaagataaatacatacggtttgattgggcaatcaagcgtcttttacgcaacaaagccaattttggtgtcctagaaggttttcttaccgtacttttgggtgagaagattcaaatcatggaaatccttgagagcgaaggtaaccagcaacgggaggatgataagttcaaccgggtagatattagagcccgtaatagcaaggatgaaataatactagtggaagtgcagaatacgcgggagttatattatcttgaacgaatactttatggagtggcaaaagcaataaccgaacatatagatttaggtggaatttatgcaaatgtcaagaaagtgtattctatcagtattctttattttgatattggccaaggaaatgattacctctaccatggtcagaatacattcctcggtgtccatactggtgactgtttgaaagtaaccactaaagaacaaggggctattatccgcaaattgcctgccgaaatatttcctgaatattttcttattcgtgtgaatgagtttaataaagtggcggttactcctttggaagaatggatagaatatcttaagactggaactatccgtccggatacaacgactcccggattggaggaggcgagacagaaacttatttattataatatgaataaggctgataaactggcttatgatcggcatctggatgcattgatgatacaaaatgatgtattgagtaccgctaaattagaaggattagaggaaggtcgtgtagaaggacgtgaggaaggtatcatggtaggtcgccaagaagaaaaaatagctacagcccgtaacttgaaatctttgaatattcctattgctgttattgttcaagctacaggcttgtctatagatgaaatagatagactttaatgaatgaaggtatgtcaggattctgttgtgtaatcacggattctgtcattttgagtcatggtgagggatcttgtgagaacaaatggatgtgattggattcttcatctctcttttttcactttccgtttttgtcatcctcctcctatttatcacggaactctttctttttccaaaagttgaatcctgcatatatacggacagttccgaaagtattagtgagggagaagtccttttttcgatagtcgtatgtatgcatcaccaacgaagctcctataaaatatttgttggtgttatagaccacggcagcacgtgttatcaggtcaaaattgatatcctttatccaatgattgtcagtattaggtgtatcgtctatttttgattttttataggcaatggccggtaagagtgaaagattggaaacccagttttttgcaaatacccagttatagccataacccacgttgatgctgtaatcagaatatttcactttcttgaaaagtaaagcatcatgtagttggactctcacttcaccgggaagcttttcgtaatcaaaagatatgttgtgctgggaataagaaaagcccgccatcagggaacccgcgcttttacgctggttggtggactggctataggctgccggataagagaattttttataattgaaaatccaataggcgttcagtcctttgattttactttgcaatccgttgaaattcaaatttttaatgggagtattcagatcaaaaccgctggaagaacgtatcttgaaatcgcttcctgtctttctgtaatataaatccacaccaaatttggaactataaagattcagtgccatttcggttttctttgccttgtttttatgtccgccgaaaatatcttttacatcgaaagaatatcctagaaatatccagcgccatccgaaatagactcccagcttgaaactggcattgggggagaatcccaaactttgttcgccgttgtttcctttactacctaaccgatagtattcgtaccaactgctggattccagcatgaaagccagattgtaaaggttgggcgagatataggtagtgtcaatcgcattgaattcttttcctactttccttatttttcttccggtatggcggacagtcgttgctattccgtcagtcaatgtaatgagaacacccttgttgtcctgtactgtcgagtctttcttttccgcttgtgcatatacattaaaggcagaaagaaaagacagacagagcaggcataatttacggatgtccataggcggaaatcagagtttattaagtatacggtccattacccagttggtgggtgtcgcactgatgccgtcgcaggtacagacagcttttccctgcaggtgttctactacggcttttatgagcggaagttgtacatgagggggattttcgggaagaaactcctcgcgtcctctttcagtatgcagggcgatgggatcgtaagtgaaaacggaaaaacagatcatccccttgtctccgatgatttctatacggtcttccttggccgattcatgggcgacaaaacaccatgatcctgatcccggcagaccggaatcaaatttgaagcaggcacttatcgtatcttctgccggatataacccgccacggttgctcttgtatccttgggcttcgagaatgcagccgaacatatcttgtaataaatccagctggtgaggagccagatcatagaaataaccgccgccggcaatatcaggttgtacacgccagggcaggttggtgctgttgtaatccaaatcacggggaggctgggcgaaacgtatctgtatattgatgacattacctatttcaccatcctctaccatttggcgtactttttggaaatagggaagataacgtctgtagtaagcgacgaaacaagggataccagtttcttgtgatatgcggttgatgcgtgcgcagtcctcatagctggctgccattggtttttcaatatacacgggctttcctgccttcatagccataatggcgaaagtggcatgagaggaagggggagtggctatataaatagcattgacatcttcatctcctattaactgctgcggatcggagtaccagcggggaatgttgtgtcttttggcgtatgattgagctttttctttgtcacggctcattacagccactacctctgaaccttcgatcagggcaaaggctggtccgcttttcttctcggtcacttctccgcaaccgatgaagccccattttactttgtctaatttaaccatggtaataacttttttgtcattccgcttaaaataataacaatttatattgcaaagataggactattttgcaatttcagccggataaaaatcagttattgtaatatttcttgcgcaacagtttgaatgcaggagtcttgacgtaatcatttaaccaggaattcaggctgtcaagcaatattggagaatgtttgcttactccccatgaatagaattgtgagaagctgatggctgtttctatatccaattgtggaaaatcattgatggaagctttggcaatgctctcgtcgcatacggcatagtctatgtcaccatgtgctaccatggccagtaattgttcttgtccgtatttctccacttctttgatatagatggtatcacctatttcgttacttaaattatgtatgcgcagaatggcaggtgagtttttgactagatgaagggtcttgcgggctagttccaactggctgtgaatgtacagactatcgttttctttttcgggtttacgctgtaccagtacttgtttgttcagtataatggggcgggtaaacaacagggagtctttgtattctgtggtaactaccgtgctgttggccaatatatcgtatgttcctttttgtacgccttccagtcttttggaaaagctcatttcgggagtgatttccggtttcagtcctttgctgtgtgcaaaagcatggagcagttcgtagtggaaaccggaaacggtgtcgccgtcggcataaaaactgattgagttgtactcggtaacggcacgcaggattcccgatgccgctatttctgcataatcgcggggcagactggtttcagcctccgttttctttttgaagaagatggaggatagggttgctgcaaggatacccatcagaacgtatttcagatattttttcatatagaccgtcaatcaaagaaattccatgaaaggccgaactttatcattcgcggattgattgggtagtgtggcgccaggaagtaattggattttcccgaaccggcattgacatgatacatcataataaagaagcgggtacgttttaaatgcaggttggcatagacgttgactatcggaaaagctcctatctcgattttgtcatcaggattctggttatagaattgtccgatgacgggggagtagtctggcgcgtaatatttactgaaataacgcacatctgctcccatttctatctggagtacttttttggcgagaccgaatttcatgtacaagttgccgtaagccgacaattccggtaagggtagaatgtcttgctcacttgatttttgataggctacttcaccgtcgagatgaaaaattcctacttttaatttttgttgcaacattgcagtgaatatttgtatgttgccggagtgttgtcttacggctgcattgttcttgaaaccggtgacatttccttcactgtcttttaccggtatgctggtattggccagataagtgtaattctttatattttccactccggcacgcagctgggttccccatctgtccagacttagttttccttccaggcgggttctcattattttggataaatcgttgttgtcccaccagtaatgtttggactggaaatgcctgaaatagaatacggggttctggttcttgatgaatgcatttacatccagtctcaccgtatctccgaataaacggagattcagatcccctctgccttctacgctgaattgtcctgcgtcttcaccagctatggctaattctcctaggatattgtaatgtaatagttttccttgttttttggatagttcgccgccaatggagagtgaactttccttatagttgttgataatgcgttgtcccggtatgtttgttgtgtcggtcaaggcgaagtttcggtattcataacttaaaaaggcggtaagtccggcttttgcccatttgttgaatccttcttgtaaagcaatgccaatggtgtttttgatggatgtacgcttcgtcttgtctatagagtcggtccccagatagttatgttcaaaatacttctgattctgtgcgtcatcgtatgagatgtatttgcgattgttcaagtctacttgtagtgtatgtatgaagcttgtgacaggaacaaatacctgcgttatttttacagagtccgtatccacactgtcctgtttttctttatagaaccctaggttgtaacgatgtgtcaggaaggcatggtagctggtgttgtgattccatatctgactcagtcgggttgggatttcgttggcggaatattcttttttgccttctgccatatccagcgggttggtgatataccggtcgtccgtgatacctccgttttctgccatcttcaagttatcgttgttgaatatgaaatgcatgtcatatttatctccccggtagctggagaacaggccaccgttgaagaaggctgtggactgatcttgataaagcccccggccatacaggtaatctatgtagaatccgaaccctagccttttgtttgcattgatggcaaaataggatttgaaacgttcttctccgtcacggctgcctcctcctttgtaataggtcaggtttgtgaatggagaaagtgtattggtgaatatgacatcttccggacgttgtacgcaaaagtcgtatgggtcggtgaaaaagtattggctggggtcccgacggtcaaaaaagatgcgtgagaggcggggggatcccaaatttcccaggtaattgtattgtccggtatagccgcccatgtcatttgagttttggaaagcgtgctgcaaggtatctacggggatataagtgacattgccaaaacgactgtccactttccatgagtacagtccgatggggattgtgctggcatctactacggctgtcgtgtctatggggtttccgttacggtcatattgatctctgttcagtccgcttgctgaggaaccgaactggttgttcagggtattcattgtccgctgtgccatcaaggaagtatggaagcacaggaataataaaaaaataatagagaatattcttttcataacggcggcaaagatacaatataaaaataaaaggaagagcttttccgctatggaaagttcttccttttattattcgtttagagttattttaacttactgaggtttaataatctccattccgattcggatggcttcttcattcatcggtatcagatgatggtgacgttcgggtaatgttttgcgtaaagcttttattacactttcaatggatactacgggacgtagttttagcaaacctcctaagacaatcatgttgaaggtctttgccattcctttttcgttggcggcatccattgcgtcaatacgatagatttgtatgtccctacgtgtcggaggctcgatgattccgtatccgtcataaatgagaataccacctggtttaattttgccttcaaacttttccaatgagggttggttcagtatgatggctgtgtcatattggctgagaatgggtgaagagatgcgttcatcactgacaatcaccgttacgttagcggttcctccccgttgttcgggaccgtatgccggcatccaggttacttccttgtcttccatcagtccggaataggcaagtatcttacccatggatagcacaccctgaccgccgaatcctgctataatgatttcctgtttcatggtttctgtctttttattctttatttttcaaatcacccagcggatagaaagggaacatgtgttccaccatccagtcattggatgcttgcggagtcattttccaaccggaattacaagtcgatacaatttccaccaaattagaacctttgccattcattgaattttcaaatgccttgcggatagcctttttggctttgcggatggcgggaactgtatgtacggactggcgggtaacgtaggcggtgccttccaaagtggcggcaatttctgtcattttcagcggatagccgtgaatggctacatcacgaccataggggcaggtggctgttttcatgccaaccagagtggtaggagccatttgcccaccggtcattccataaatggcattgttgataaagatgatagtaatgttttcaccacgatttaaagcatggatagtttcggcagtaccgatacatgccaagtcaccatctccttggtaggtaaataccagacgtccgggccataaacgcttaatggcggtagctacggctggtgcgcgtccgtgggcggcttcttgccaatcgatgtctagataattgtatgcaaatacggcacatcctactggtgacacaccgattgtcttatcttccatgcccatttcttcaataacttcggctattaacttgtgaaccacaccgtggctgcatccggggcaataatgcatcggattgtcattcatcagtgtcggtttcttataaaccaggttttcgggttttatgatttcttcttttgtcatagtttctcctcctattgtttataacatgaaccgcataaagaattccaccagcttgagaaaaatagctgctgcacagacatagatgaatactttgaagtcacttgccacgaagtaagtgatgacagctgctaatgccagtgccatgaaaagtatgttcaatatatttctgatcagatcgatattcatacggtcttattttattagtttctctttcagtgcagtgattacttcatccggatcggggacaataccacccagacgtccgaagtgttctacaggcactttacattttacagccagacggacatcttctaccatttgtccggcgttcaattctacagtgaggataccttttacctgtgcggcgcgtgctgcaatagctttcgacgggaacggccatagggtaataggacggagcaaaccaactttgatgccttcttcccgagccatttccattgccttttgggcaatgcgggcgcaagagccgaaagctacgatcaaatattctgaatcttcgcagtgaagttcttcgaagcgtacttcattctcttctatttctgcatattttttctgaagatgaatattgcgcttttccatttcggcgggatcgagttctaatgaggtaatgatgttgggggtacggtggtgggttctgccggtagtggcccacggacaacgggcaatgacttcttcatctgtcaggcgtgtgcgctgttcgggtaatactactttttccatcatctgcccgataacgccatctgccagaataatggcgggattgcggtatttgaaagccaaatcaaaagctatacctacgaaatctgccatttcctgtactgatgcaggtgccagggctatgagacgatagtctccgtgaccgccacctttcactgtttggaaatagtcggcctgactaggttggatggttcctaatccgggacctccgcgcatgacattgacaatcaggcaggggagttcggcaccggcaatgtacgagatgccttcctgctttaaactaacgccgggactggaggatgaggtcattaccattttaccgcttgctgcaccgccatataccatgttgattgctgcgacttcactttctgcctgtaacaccaccataccggtagtttcccaaggtttctcttcggccagcgtttccaatatttccgattggggagtgatgggatagccaaagtaaccgtctactccgatacggatggcggcgtgggctatggcttcatttcccttcattaaaacgacttcttctgccatatttgttacatttattgttgttttactttatacacagtaatgcatccgtccggacagactgtggcacatgatgcgcaaccattgcaggtatcctctaatacctggtgggcgaatgtgtatccttttttattcacttgtttggcattgagcgcgattacatgtagcggacatgccactacacatagattgcaacctttgcaacgctctgtgtctactacaatagcacctttaatctttgccatgggttagttattattgattatacatgtctttgttatagaaattcagaatattcataatcatgtcacgggcggaaacggcgggactttccggattacgctcgatggcttccaaataattgttcaaagcttgttgccagtttcccattttgcggtaggcgttacccagtaagtaatagggttcatcgttgacgtgcgcatcgtttcggatgaaattagttagcgcatgaatagctctctccgtatcaccctgttcgataagtgtctttatgtcctgtaattcttccgtcataaggcatgattgtctcattgttgtttacaaagatactctttatttgttatgaaagggaagattggagcagaaaaaacgactttcttgctaaaaacatttaaaaaaaggagagaaagatagggaaaaaatggaagaatgatttcttctaatggtttgattattatagaaatggtttcaagtgaaacggttgatagaggaacggtgttatttattcttaaaggggggatatgtttgaattgtatttgtcatgatatttttggggggaagtatatggtaaatcgtttgtatgttttttagggggagttgtcaggttatctccccccctaaatattttatgtattatcgtatagaattaactgtcacggcataaatatatagaagaaaagattattttattacttcacctacatacatattatatgccttctggccgttgttactggggttcattttttttgcttcctcaccggtaactgtctgtttcatcagtttcttacagtttactatcaaccacggctcactactaccttgcttgtagaacgaaattttataattgtcgctttgatccattagcatattgcccattgatttggattgatcaattatgcagaatgctacttctttgccgaataactgaccgaaacctccccaacattctttaccaatttcgaattgttcatcgtttccggcagtaattgtcatacgtgaagatgccttgatttggtcatctatgctttgttctttgctaggagttacattattggctacttttatttcggtattaccctcagaaccaccgatgatagccggttgggcagggggagttaccggagtggcggtaatgattgtggttgtatttgatatcggagtggctgttacacccgaagtaggagcaactgcaatttgtgagttgttcaagactttgttgcccaatgtatcttggatggatttgaacagtgtgtctttcaagtcaattgtttctcttctgaatttgccgcagatgggagccagtttggttttcgatttgtttaaagccatatcgtctacaatccattcctctgcgctgtatttttctcctccgtcacgagcttcatcataccaatagcggatacgggtcatttcgatatcacattttccgtttccgcaggtgataaacatctgataataaattctggttctgtccaatgacaatgcagaggatgagaataccagatattcttcgccacctgctgcaatggttccttcatcttcattggtgtaaagaacacgtgcattgaacttgccttcgggcttgaaacgttctgtagcccatttcagcattgtctcatatagctggtctttcgttaaagacggtgcctgtatttctgttttgaaagaaactttaccgtcatccaaagttattgctcccgccagatatttgggatctgtctgtgccatagcgatgaatggcaggcataagagcattaaaaaaagaattttcttcatagtaatatatcttattttatattttaatctaagcaaagataggaataaaaaaaaagagaagctataaagcctctctttttttacttttattattattgcgtgaattttactttacaggtatcttttcaatgcgtttttggtgacgtccgccttcaaagccgctgttaaagaattcatctaatattttttcagccatttcatggtctatgaatcgtcctggcattaccagaacattggcatcattgtgttgacgtgacaaatgggctatctcgggaatccagcatagtgccgcacggataccctgatgtttgttcaatgtcatgctgatcccttcaccgcttccgcaaatagctactccaggtccgcattctccggcttctatagccagtgcaagcggatgggcgtaatctgcatagtcacagctttctgtactgtatgtaccgaaatctttgcatggataacctttttcagtcaaccatgtttttacaaactctttcagttcaaatcctgcatgatcggatgccagtcctacttttttcatgccagcatttcttttacttggttatacacgttctgtgcggtaaagcccagcttttcatccaatactttgtaaggagcggagaatccgaatgattccagaccgaatactttaccgttggcacctaccaaaccttcaaggtttacaggaagaccggcagtcagaccgaatactttagcctctgtgggaatgacactgttttggtattccttgctttggctgcggaacaatccctcagaaggagcggatacgatacgtatttttatgccatccttgcggagaagttctgcacctgcttccaaagtggaaacttcggaacctgaagcgactaggattatatccggattttcgtcggaacctgcaacaatataagcgccttttgcagcctgtgagtagtcgtttcctgcaggcagattcgcgatattctggcgggagaagattagtgcggtgggggtgctggtattttccatggccaatttccacgttacagtggtctcttccgcatctgccggacggagtaccaacatagaattgtgccctttgtggtttttcagtttttccatcaggcggatttgtgcttcttgttctaccggttcgtgagtaggaccgtcttcacctacacggaatgcgtcgtgtgtccagatgaacttgacgggaagttccatcaaggcagccatacgtacggcgggtttcatatagtctgagaatacgaagaaagtagcacatgcagcaatcacgcctccgtgaagtgccatacctaggcagcagcaagccatggttaattcggaaacacctgcttgcagaaacgcgccggtgaagtcatctttagtgaatgcatgtgttttcttcaagaaaccgtcggtcttgtctgagtttgacaggtcggccgaagaaacaatcatgttttctacttctgtagctagtacaccgagaactttggcagaagcactgcgtgtagcatctccggctttttgttcaatagcattccaatttactttcggagctttgcctgagaaccacagttccaatttagctgccagttcgggattagctttagtccattcagctttagctgcatatttttctgcaacaatttttttcagttcttctgcacgtttggcatacaactcttttacttcagggaagatttggaaaggattggttggatcgccacctaagtttttgattgtattgatgtaagcatcacctcccaaaggggcaccgtgggtggcacagttacgttcataactggaatcatccgctttgcgtgcacctttacccataatggtcttaccgataattaatgtgggctgaccggttacggctttcgcttctgtcagagctgtgcggattgcatcgggatcattaccattgataataattactttccagtgccatgcttcgtatttcttggcaacatcttcgctggtaacagcatcggtagcggtagacagctggatgtcgtttgaatcataaaacatgatcagattgtccagtcccaaatgacctgccaaacgtcctgcaccctgagaaatttcttcttgaatgccaccatcggatatataggcatagatagtctggtccatgacattacccagacgggctttcagaaatttggcagcgatagcagcacctactgcaaaagtgtgtccttgtcctaacggaccggaagtattttcaataccgcgcatgatgtccacttcagggtgtcccggagtcggacttccccattgacggaactgtgccagttcttccatggtgaacttgccggtcagtgccaaagtggaatacaacatcggtgacatgtggcctggatcaaggaagaaacggtcacgtccttcccaacgcggattttcaggatcgtaaactaaaaactcagagaaaagtacattcacaaaatcagcgccacccatagctccacccggatgtcctgaattagctttctctaccattgaagcagccagaatacggatgttgtccgctgcacggttcataagtttcttttcgttcatattaaaataatattataatttgaatgctattagtgagtcggtttatccttgctattttatttaatatctgcaaagataactctttatgtgtaaaccacaacatgtaaagaggctcttttttaaacctgtttgactcacttcttaaattgggtcgctgcttcttcaacaggcagtcctgccttatagttttcgatatatgtgttgaatccggctacatcttcggctgttggcgatatttcaataccggcatcaccggcgaatactttgtcttccagaaaatctgccagggattgtttcttttcattgttgacaaggtaagaacctagcagggcgattccccatgcgccaccttcaccggcagtttccattacggaaataggggagtttatagctgctgcaagtattctctggcctacacctttcgtcttgaataatccgccgtgtcctgtgattctgtctactttgattttctcttcattgaaaagaatgtcattacctatcttaagaactccgactgaagcgtataaatgggtacgcatgaagttggcgaggctgaatttgtcatttgcagaacgtacaaacaatggccttccgtcggcaagtcctgtcacgggttcacctgaaatataattatatgaaataagaccaccgcaatctgcatcacctgcgagcgcatgattgtaaagttttccatataattcattcatatctacaggtatacccagcagttcttggtattccttaaacagattgatccaggcattgaggtcggaggtgcagttgttgcaatgtaccatagctacaaggcttccgtcgggagtggtgaccatgtcaatcatttcgtatggcttggacaactctttttccaacacaatcatggaaaatgaggaagtgcctgctgatacattcccggtacgttgcttgacagcgttggttgctaccatgccagttccggcatctccttccggaggacagacaggtatacctgcttttaaatggcccgacacgtccagcctcttggcaccttctggtgtaaggaaccctgcattctcgccggcgggtaagactttgggcaggatatctgtcagtttccaggggtatcctttaggagctaccaacttgtcgaacttggctatcattccggcagaataattcttggtagccgggtctatgggaagcattcctgatgcatcacctatgcccagaactttttgacctgtaatttgccaatgaatgaaacctgcaagggtggtcagatagtcaatgtcacttacgtgctcttcattgtctaaaatagcttggtataaatgagaaatgctccatctcagaggaatattatatacgaataattcagataaagcggctgctgccggaccggtattggtgtttctccatgtacggaaaggtacaaggatttcttcttctttattgaatgccatataaccatgcatcatggcactgacaccgattgctgccaaggtttctatttctgtgtcatatagcttttttacgttggaacggagatctgcatagcagtcttgcaggccatgccagatagcttccacactgtaagtccacagtccgtctaccaattgattttcccagctatggcttccttgggcaatgggcttgttttcctggtcaatcaaaacagctttgattcgcgttgatccgaattctatgcctagaatagcttttcctgcttcgatggttgattttgcatctgatttcatattaaaacctataatttaaggtacaacaataatgatgataaaataaggtgggatgtgccaagaatcttattagccttgacacatcccctcttcatggatgaattagcaaagtgctttgttcagcatatagtagacttcgttcatgcgaagctctttcttgaagttgctgatggtagtatctttgtcaatacggatcatttcgatacctgcaatttcagcatagtcttcccaatattctgctgtcagatcataagagaagcaagaatgatgtgttccacctgccaggatccatgcgcctgcacctacttcgaaattaggcatcggaatccacagggcggaagcaaccggtaatttgggcaacggtttcggttcgatgcattctacgtcgttcacgatcagacggaaacggttacccaagtctactacagtggcggtacaacctgaacctacttttgaagtgaatacaagacgggctgtctggctcttgcgaatacctatacctaggaagtgtacttccagacgtggtttggaagcggcgataagaggacaaacttccagcatatgtgattgcaggatagcactgtttgcaccatcgaagttcaatgtgtaatcttccaagaaagaacaaccttgggaaagtccttggttcatcacccatacagtgcggtagagagctgctgatttccagtcaccttccgcaccgaatccgtagccttcagccatcagacgctgggaagccagtcccggaatctgatcgaagtagctgccgtctgtttggcccaaatcatcaaaattagtagtgaatcctttagcgcctttggctttgaggatggcacgaagagctaattcggcttttgcagcattccatactttctgataagcttcggttgatttatcttctaatgaagcatcgtggtcgtattcgttaaagtaagttgctacaagtgcttctacatctgtatccttgatatttttatggtattccatcagttcgcttgccggacagtaatctacgtggtaccccatacgttgttctgcttccactttatcaccgtcagttacagctacattattcatctgatcgccgaaacggatgatcagcatatcctgagagtctgcccaacctgcacaaacgcgcatccaaacggcaatcttgtgctgggtgtcttcgtctttccagtaacctaccactactttgcggcggatgcgcatacgggtacagatatgtccgaattcgcggtcaccatgggcggattgattcagattcatgaagtccatatccatggtatcccaaggaatttccttattgaattgagtgtgtagatgtaacagtggtttctttaactgctgcagaccgtgaatccacattttagcaggggagaaagtgtgcatccaagtgatgacaccgatacatttttcatcgttgttggctgctttgaacactgcttccacttctttagaagaattggctgttcctttatatactacttttacaggaagtttccctgattcgttcaatccgtttaccatttcattggagtgagcgtctactgctacaactgcgtcacctccgtacagaagctgtgctcctgttacaaaccatacttcatactgatcaaatgctttttccataatgttatattttaaaagggttattaatttctttgtttcttatttctgtccataataggcattgggaccgtgtttgcggctgaaatgcttttctattaataaagaattcatcgttaaatgagggttggcggcaaaagcgatacttgccattttggctacctgttccatgactactgcattatgcacagcatcattggcatcttttccccatgcaaaaggaccatgattttttactagtactcccggagtatgtacagggttcagtttcttgaaacgtttcacaatcacattgcctgtttcctgttcataggcaccttttacttcctcttctgtcatatctgcggtacaaggaatggcgtcatggaaataatcggcatgagtcgttccgatattgggaatatccattccggcttgtgcccaggcggtggcataggtggagtgggtatgtaccactccacctatttcggggaatgctttatatagaactacatgggtgggagtatctgaagacggacgaagagaaccttctaccacgttgccgtccagatttactacaaccatgtcttcagctttcatatcatcgtatgatacaccactgggtttgattactaccaagcctgtttcacgatcaatggcagaaacatttccccatgtaaaaataactagtccgtgtttcaccaaatccagattggcacggaatactttttcttttaatttttctaacataatgaataattgggtaatgtggcaatatgctaatttgtcaattggcaaattattgcatcggcacattattttaaagtttaaatttcggatcctttctgtaggccttatcattaaatttataaagataagcacctcgtcgggaacctgatttgtctatcaaatctgttttttcaatgaaatccatttcggctacccgcttgcggaaattccgcttgtccatcggttcgccatagattgcttcatatagattttgcaactgtgtcagggtaaacaattcgggcagcaggttaaaaccaattggattgtatgatgctttgtgcttcattagttcacgtgctttggaaatcatgatcggatgatcgaaaatgagctgtggcagttcgtctatttttgtccaatgggcattgtgctgctgcactagttccctgtcatattcatttacattgactaaagcataataggctactgatataactcgttctcctggatcgcgctctaagtcgccaaatgtgcctacttgttccatatatacattttccaatccggtcagttctgccaatacccgtttggcggcagcgtctacactttcgtcttcttgtacgaatcctcccatcaaagaccattttcccatagctggttcaaaatttcgttttagtagaagcagttttaattctccttcgtcaaaaccgaaaatgatacagtctacagatacatagaatttaggatttatgttataataggtggtcatggtttagtgtcggtttaaaattaacaggctgtattcttcaagataattcaaagcatacagcctttaatttatggtttaccagaaataagcatagaatagtgcgcaaagcagaactacacctaaagaggttataacatcccatttgttccaactctttctgataagttccttgtaactgccggtaaaggtgatggcttccacttgtttggcggttggagccggagtgaagcatgatacaacaaccattaacaacaaaaggaatacaagtaaccatatttcaaaaataagccagtttgtctgccaaaaccaagttgtattttcccaaaaccagccggtcatcacatcttttccggtgttggtgaggatattagtcagcaaacggatcataccaattaggaaaccgacaatcatggcagtttcaccggctttcggagtgattttcttggagaatataccaagtgcaaatacggctaccattgcaggtgcaaggagagactgtataccttgcagatagtcgtaaaggctgccgagactcatcattacaggaatccatgccatgccgaggataactacaactacggtagcgatacgtcctaccataacataagtagcttcacttttgttcttaaacatgggtttgtaaaagtcttctgtaaaaagtgtggcacatgaattaaagaaagcagccagtgaagcaaccaatgcacagatgaatccaatagttacaataccttttacaccggcaggcagaacatcctttaccattacagcaaaagctgcatctgtatttgacatatcaaattcaccttttgcagccaaggcggcagctaccatccccggaataagaaacatgaagacaggcaggattttaaaataaccggctgcaatagtacctctacgggcacgcttcattactacatcattatcttcgcctttacgttgtccaagtacacgctgtacgatatgctggtcggtacaccaataccagaaaccgatgatagaagctccgataaatacccagaatccaggataatcttgatacatcgggtctgcttcagtccagtgaaacatatggttggcaccataagcgtgtccgtctgctcctatattcatggcgctacgcgcatgatccatcatttctgtccatcctgtagcaatattaccgtctcccaaggctgacagtcccaggaaaagaaccaagaaagaaccaatgattaaaataggggtttgaatagctgagagggtcattactcctttcattccactcagtacggtgaagatgccggtcaggacaataagtccgattgccccataccaaaaaggaagtccaagtaaaaattccaaaaagatacctccggtataggcggttacactaactttagtaagaatgtaggctatcaatgtgatgatagaaagccatgaaccggtacgtggggtataacggtatttaaggaaatcgggcatggtaatgattttgcccattttattgtttaatagttggtagaatggaacaaaaagccatcctagaagaagaatcatccaaccttgcatttcccagtgtgccatacctactccggatttggcaccggttcctgccaaacctaccagatgttccgaaccgatattggctgcaaagatagcagcaccaatgatgtaccatggctcacctttaccaaatagataatcttcactgcttgctccttgttgcgagcgtttgtctttttgtacagagcgccataccgcccatatcacagctacaatgccgactgccagtattgtccagtccagccagatgaattcatgtgaattccaattcatgatattaaatatttaaagtttaacaattatttttcaacaccgaatttaaagatacattggctgtgataggtctgtcccggttccaggattacagaaggccattgtgatttgttggggctgtcgggatagtgctgtgtttccagacaaacagacgcgcgttgcggataagtaattccctttttcccttttacagttccatccaaaaagttgcctgtatagacttgtattcccggttcattagtatatatttccaaagtgataccactagtggggctggtcagtttggcagccagttggttgatatcacctttcgtgttaagtacccaattgtggtcgaacccgttgccgaattttatttgttcgttttcaaaattagtcacatcgggggcaatagttttaggagtattgaaatcaaatggagtttctgttactgctatcatttctccagtggtcatgaatgtgctgtcaacgggagtgatgctgtctgcatttacataaagaatatggtcggtggctggattggcagggtttccactcaagttgaaataagagtggttagtcatattgataacagtctttttgtcagttgtcgctttgtagtttatgtcgatggcattgtctcttgtcagtgcataagtaacagtagcggttacatttcccggaaaattggcatctccatctggtgacttcatagttagtgtcatagtactgtcgtttaattggtttgcttcataaacttggtattgccatcctttaggacctccatgcaggcagtggccaaaattattttggggcagttgaatggtttctccatctattacgatgactcctttattaatacggttggcatagcgtccgatagaagcaccgaagtcgctgggaatattttggtagtcagcaatgctgtcaaaacccagcactacgtcttttagatttccgtttttgtcagggaccatgatagatacaatacgtccgccaaaattggttacgcatacttccattccggctgcattttttagcgtatacagtttaacaggttttacgccatccactattgtttcataattagtgggggctaatccggactttgtaagtgcttcttgagattgtttgggagcgcaagcacttaacaatgtcagtgcgataccggttcccagaaaggtttttttcatgcttttcatgatataaaagtactaattagtaatagagtatatgattttgggtgtaaaagtaacactattactaatacattggatatgaaaagagtatgttgtgcaacataaaagtgtatttcctacacttttatagcataaagaagaaaaaaaccgctttggattcaaagcggttttttcatatgttagcgaatttgagatattttttataccagcttgcgagaaccgtcactgatgactacatcgtaaacttttggacttcttccgaatttttctttgaatctttctttggcagtggtgatgaatgtttcgtatagttcatttttaactaggttgattgtacatccaccgaaacctccacccattacacgtgaaccggtaacaccgcagtcgaaagcaacatcattcaagaaatcaagttcctcacagcttacttcatacaatttactcatgccatagtgagtttcatacatcttctgtcctacggtttcgtaatcacctctttccaaagcgtcgcaaacatcgagtacacgttggatttcttcaatgacgtattctgcacgcatatagtcttcttcactgatctcggcttttgcttcctgcaacatttccattgtacaatcacgtaaaaattctacatgaggatgttttttctgaatggcagatacggcagcttcacaactttgacgacgcttattgtatgcagaagaagccaattcgtgtttgactactgagtcaactaatactaaacggtaaccttccggtttgaaagggaaatattgatattctaatgaacgacaatccaaacggatcaaactaccttcttttccaaatacagatgcaaattgatccataataccgcaatttacaccacaataattatgttctgttgcctgacctaccttggctaattcaaatttatctattttgttgtcgccgaaaagttcgttgatagcgaaagcgtatgtactttccaatgcagcagatgaagacatacctgcacccaaaggtacgtcacccgcaaaagcagtgtcaaaacctttcacatctacaccacgtttgatcatttcacggcaaacgccgaaaatatatcttgcccaactggctttaggagcatcttcttcgttcaaaccgaactctacatagtcttttaaatcaatagaataagcacgtaccttattggtaccattaggtttgatttcagcaatcatacctttatctactgctccgggaaatacaaaaccaccgttatagtcggtatgttctccaataaggttaatacgtccgggtgatgcatatactgaacctgttgtaccatcaaaatgtttgatgaagcgacttcttacgtattctatatccatgatattaatagtttaaagttaatactatatgtttttataattattctacaggaatgtctttgtttacgttcttgcatcctatcaaaccatagaacaacagataagcaagcaaagcgataattaaccaatagctggccatatatcccacagcgtcagaaatgaattgctgcaataatgggaaaataccgccaccgacaaccatcatcataaaaatacctgaagcttgtgcggtatatttgcctaaaccctctacagcgaggttgaagatacctccccacataatggacgtacataaaccacaaagtaccaaaaatagggcactgacaggtacagaggccatttcgaatccattttctacactatatcccggcatagagacagtgatttcttttggagtgaagattgcgattaatataaaacagatagctgttgcggaaacaacaatcaattgtgtgcgtgtagctactttaccgctgatgacactacttgcagaacgtcccactaacatgagcaaccaatagatggcagcaatagcaccaccgatagcggcaccgttggcaagcaggcccgcacctttttccgttgggtcggcaaggtagaaatttaatgtgcctggaataccgatttcaatgcctacatatacaaagataccgattacacctaatacagtatggcgaaaattccaaggactatgagagaatttctctttttcatgacctgcttttcttagatggggctctggaatagcgatgaatgaaagagcgataaacgctgatacgaatacacccattgcgatgaaaagcagaggagctacatctgacatagctgtttgaggggtgacagaaccaatcaaggcacctacgaaaagcggagtcaaagtacccgacaatgagtttagagcaccaccggcttggattaattggttacctttgttaccaccaccacctaaaagatttagcatcgggttaactactgtgttcagcatacatacacaaaaaccacagacgaaggcaccaagcaggtagataataaaattcattttaatggcatattctcctaaattgaatacgtctatatctgcaccgaacaaactggaaatatattggataaacaaaccgatgaaacctactgccatggcaatgagggctgtttttttatatccgatttttacaagcatattacctgaaggaatccccataaacagatatgcaaggaaattcatcatatttcccatcatacccaaggtattggcacctgcatattggtttttccatattgtgccgaaaggcgcagcaagattagtaacgaaggaaatcatcgcgaaaaggaagaacattgtaatgatagcgatgatattaccgttctgtttttgttgattcatggtcttgaaaaaattataagtttataaattaggttatttcataaaattatttttctacaccgaatttgtagatggttacttgactgtaagtttcccccggatgtagaacacaagaagggaaatggcctttattgggtgtatcaggaaaatgttgtgcttcaaaacagatggcacttcttgctgggaaagttgctccatgagcaccttcgaaaccattatgccagtttgaagtataaacttgtacgccgggctctgtagtgtatacttccatgctacgaccgctttcgggctccacacattttgctgcaaaactcagtgtgcctgcttcacgtttgtttaatacatagcagtggtcatagccggcaccgaattttagctgttcgaatggggcattgattctactgtctactctttgaggagtacgaaaatccataggagtaccttctactttggcaatttcgcctgtagggattgatacattatctatcggagtataaaaatcagcattaatggttacgatgttgttatcaacggttgccgtaggattggcaatgcctgataggctgaaaaaaccatggtgagtgaggtttaccaatgttgttttgtctgttgtagcgtggtaagtaatgatgaattcattttgattacttaaagtgtacgttacgtgaatatccaaatttcctggaaatccttcttcgccatcagcagataaataatgcaatttcaaactttgtggagtttcctgttctgcatcccaaatgcgggtatgaaatccggtaggaccgccatgcagcgagttgggaccattgttgatagtcagtgaatattctttcccttctaaaatgaatttgcctcctgctatacggtttccgtaacgaccgataagagtactgaggaaaggttcgtggctattgattacatgggttatactatcatgtccttgaatgacattggcatatttaccgtttttgtccggaaccataatagctaatactgctccaccatagttggtaacagctatttcagctccgttttcatttttcagaatgaagaggtctgtttgtttcccgttcactgttgtctgaaaatcggcccgtttcaggccacataaattctcatcggaagtagatgtgtttatcatgttattgaaaatctttttattgtatgtataaaactaatgcaaataaaaagattttcttcggtattcccaaactttttctataaaagtgaacggactaaacgtgaaattttaataaatccgcaacgataaagctgcttcctccaacaaaaataaagtcatttttgttagctttttctttagcggctgctacagcggtttctacatcaggataagcatctccgtgcagcctggattgcatcgctaagctttgtaattctttttcggataaagcgcgttttacactggctttggtaaaataatatgtggcatttttaggaagcatggacaatactccactgatatccttgtcgtttaccatacctattacaatgtgtaatcgttcatatttctgatgttttaattgttctatgatatacgaaattcctcctacattatgtcctgtatcacatattaaagtcggttcactttctaatttttgccatcttcccatcaggccggtgagttcacatacttgtgagaaccctttacgtatattactttcggtaagctgataacctgcttgttttaataggcggatggcagataaaagcgtattggtgtttttaagttggcaaagtccttccagctcgccttccagattgaggtagtcggttgtttgatatattcgtttacctttttcatttatactggaggagtgtaataactgttcttcttctgcaaagtagataggagcgtttacttctttagcacgagttgtaaatataggtttggtttcaggtgtggtttcaccaataactaccggagtcttttctttgatgattccggccttctctgtggctattttggctaatgtattacctaaaaattgtatatggtcgaaactgatattagttatgacacatagatccggacggatgatatttgtacaatctattcgtcctcccaggccgacttctataatggctacatctatttggctctgggcaaaatagtggaaagccattgcggtagtcagttcaaagaaagaaggatgcagaggttcaaaaaagacacggtgtttttctacaaagtctatgacatattctttggatacaggaattccgttgacacgtattcgttcacgaaaatctatcagatgtggagaagtgtaaagtcctgtcttgtatccggctgattgtaaaatggcggctaaagtatgtgaacaagagccttttccattggttccggctatatgaatggttcggaattggcgatgaggatggttgaaatactcgtctaaaagataagtattctctaatcctgctttgtatgcatcttttcctatatgttggaataatggggcactattatataaataatccaatgtttcttcgtaattcatggcaaatgtttttatttaccgcaaagtgtcacaaaagaatgccaggcagatataaaacctagtattctttctgtgacactttgtagtataaaaattaatcgaagaagtttttgaacttcttgaatattttttctttaatgcttgtattcggtttgaagttatccgattcttgcattttctctagtgcttgtttttcatctttattcaatgtttctggaatatatacgcttacattgactaataaatcacctgtaccgttactgtaaccataactattgacgttgggcaatcctttacctcttaggcgtaagaccttacctggttgggtgcctggttcaatttttacttttactttgttatcaatagttggtatttctacagtgcctcctaaagcagcagtcggaacgcttagtaacagattgtaaatcaaatcattttcatcgcgtattaggtctggatgggattcttcttctatgacaacaagtaaatcaccgggaacaccgttatgtttgcccgcatttccttttccattgacagaaagttgcattccttcagccacaccggcaggaattttcacttccacgacttcttctccgtatacaataccttctcctgcacaagctttacatttgttcttaatgattttcccttctccgttacattgtggacatacgctttgtgattgtaccattccaaaaatgctttgttgggtgcgggtgatacttcctgttccatgacaagtgggacacgtttccgttcctccttctccttcggctcctgaaccatggcaatggtcacatgttacgtactttttcagtttgaatttcttttctactcccgtagaaatttcttttaagttcagttttacttttacacggaggtctgaaccacggaacttgcgttgtgcggaacgtccgccaccgccgaaacctccaaagcctccgaaacctcctccatgtccaccgaagatgtcaccgaacatagagaaaatgtcatccatggacataccttgtccgaatccttcaaaaccgccaccggcggctccactcattcctgcatgtccaaattgatcgtaacgggcgcgtttatccgggttgctcaacacatcataagcttcggctgcttccttgaatttttcttccgcttctttatcccccggattcttgtccggatgatattgtattgcttttttgcggtatgctttttttataacatcaagggtggctgttttgtccacctccagaacttcgtaatagtctctttttgccatgtcgctttatgatactgttttattgagccacaactactttggcgtggcgtattactttgtcattcagcttataaccggtttgtacacagtccaatattttccctttcttctcttcagaaggagctgggactaatgcaattgcttcgtgataatcggtatcaaagttctcaccgtcagtctctattttctgaagtccttcctggttcaatactttcaggaatttgttgtagatcaactcaattccttcacgcattgcttttacatcatccgaagtttctgaagtttttacagcacgctccaagtcgtccaaaatagggagaatggcagtaatggccttttctccaccattcttaatcaattcggccttctctttcatggtgcgtttacggtaattgtcaaattcggctgaaagacgcaggtatttgtcatgctgctcttctattgttttctgagcttccgccaattccttattcaccttctcttcagcgttcagttcttctgttgcttctttctgagtttcttcatcaatggcagcttctgccgcttcctgatttttcaaaacttcctcgtcttgaggttggttcttctctgttgggttcatattcttattaaactttttgtttttcttatttttactcataacagtcaggtcttttaggttaatttactgctaacaaatttcgtgcctagttgtttccttagagtgataattttgcaaaagtacggaatttctgccacactggcatacttttctgaattaaaatacctacctttgcaatttcaaaatagaataattatataaataaggtatattaggatgattacagtttcgaacttggccattcaatttggtaaaagagtgttgtataatgacgtaaatatgaagttcatcaatggtaatatttacggggttatcggtgcgaacggcgccggaaaatctactttcttgaaagcaatttcaggtgagctggaaccgactaagggttcagtggtattaggaccgggagaacgtctgtctgtattgagccaggatcactttaagtgggatgaatatacagtcatggatacggttatgatgggacatactgtgttgtggaacattatgaaacagcgtgaagaactgtatgcgaaaactgattttacagatgaagatggcttgaaagtttctgaactggaagagaagtttgccgaactggatggttggaatgccgagagtgatgcagcttctttgttaagtgggttgggcataaaggaagacaagcattatatgttgatgggggaactgagcggtaaggaaaaggtgcgtgtcatgttggcacaggcactttacggtaatcctgataacttgttgttggatgaacctaccaatgatttggatatggatacggtgacttggctggaggaatatctttctaatttcgaacacacggtgttggtggtaagtcatgaccgtcactttttggattctgtttgtactcatactgtagatattgatttcggtaaagtgaatatgtttgccggtaactatagcttctggtatgaatcaagtcagttggcacttcgccagcagcagaaccagaaggctaaagctgaagagaagaagaaagagttggaagaatttatccgtcgttttagtgccaatgtggctaagagcaagcagacaaccagccgaaagaagatgttggagaaactgaatgtagatgaaattaagccgtcgtcccgtaaatatcccggtatcatctttactccggatcgtgaaccgggtaatcagattttggaagtatccggcttgcgtgcggaaactgaagacggtatggtattgttcaatgatgtgaattttaatgtagaaaaaggagataagattgtctttttgagccgtgatccgcgtgccatgactgctttttttgaaataatcaatggaaatcgtactccgcaggctggtaaattcgcgtggggtgttactattactacggcttatttgcctttggataatacggatttctttgaaagtgatttgaatttggtagattggctgagccagtttggcgaaggtaacgaagtctatatgaaaggtttcttggggcgtatgttgttttccggagaggaagtattgaagaaagtgaatgtgctttccggaggtgagaagatgcgttgtatgattgcccgtatgcagttgcgtaatgcgaactgtctgattttggatactccaactaaccatttggacttggaatcaattcaggctttcaataataatctgaagacttataagggaaatgtgctgttctcttcccacgaccacgaatttattgaaacggtggcgaaccgtattattgaattgaccccgaatggtatcattgacaagatgatggaatatgatgaatacatcacttctgatcatattaaagaaatgcgtgcgcgtatgtatggagataattaaattataaatatgagctgaaaaagaaagagtcattgggagccattgttcctgtggctctttttttatggtttagccgcaattctcattctgtatgaatcataatgagttcaaaaatctatgataatggacgataatccatgtcgttatattagaattaggattatttttgtgtccattaaaaacatgaaatgatacttatgaaaaacttaattttgattttgatttttgcagctgttagcttgaatacgatggcttccaatcctgtacatgtgattataactgccggacagtctaataccgatggacgaactcctaatgaagatttgccggcatatattaaagcattggctacggacacactgacgtataccgaaggtgcctaccgttattgtcagatagctcagaatgacgggaaaggagaatttattcctttctggcctcgtgccaaacgtagcggaaaaaataatatgtgggcttttgatgcagtgacatattattggttggagcagttgttgcaggagaaattttatgtggtgaaatgggctgttggcggaacttccattgcacctgattataatgcttccaagggacgtttttggtctgcggctcctgaatggctggcacaggctaagccaacttctgatggaggaaattctttgttgctttctttcattcaagagatagacatgtgtatagacaaaactctttcccggctgaaggatggctatcagatagatgcatttctttggcatcagggggaaagtgattatgctaaaagtaaagattattaccgtaacttgaagacaatggtggcttatgtgcgtatgcatctgacagaaaaaaccggaaaggattattctcgtttgccttttatttttggtactgttgcccgaagtaataaatatttcagcagagaagtggagaatgcgatgaagcaattggctgctgaagatccgaacatgcacctgatagatatgtcaggcgcagaattgctaaatgacagacttcattttacggctcattcggcagagtatttgggacaacaggtatataagcagttggaacaaattattaaaggagttatcgtcaggactgatgaattgaaaggaaaacgtttgggaattattggagatagttatgtgaagaatcataaggaacctgttaagaatacctggcattataaatttgccgagaagcatggtatggaatatttaaattatggcaagaacggcagcagcattgcttatagtagcccgcgttggggggaagcgatgtatgtaagatataaggaaatgccggatgatttggattatgttattgttgtgggtgggcacaatgatggttttaaattggattcaattggcggtattgatgtatttaaagagaggctggcaatgctgtgtgaagggcttattgaaaagtatcccacagctaagatttttttctttacccgatggaactgtaaaaattttgcaggaagtgatgctgagaaagtggtggatgctatgattgaggtttgtggaaattatagtattcctatttttgacagcgcccgaaaaggaggaatttatgcaaataatgatcattttagaaaaatatattttcagaacagcaaaaataatacagatactgcacatttgaatgaaaaaggtcatgaacgtttcttgaaagtggctgagagttttatattgcaatactgaataatgtaaatgtaatgaattatttttgaaatgtgatgacgcagaaataatccatttacaaattacttactgttcggaggaaaaagtgaggtattctttctccgctagggaaagtaattctcttttgattttctaatagtcggtttgctttgttgtaaatgtcaactgaaatgtcttgctctctggacttggcaaaagagtgattggcagtaatgatgcgtcgggatgaaagtttcagtgtccagcgtatatcttcagcagctacataatgccgagtaggacgcatgacgtgaatgcgcaatatatatccttttgccagtgcctcattgactgtttgcagatttcctgcctctagccggataccaatagctcatttggacatagtgtaatcttgcgcttgaatgcttcccatccatgatacgaggtctttcggattatttaaaactggatttattaactgttggctgtgcagacggatggtaggtatcatttcagataatttccatcaaacgataaaggtaaaagtccacttacgttttctaatatataaatatcagtcttactataaagcagtatccgcatgggttttccatatcgtttttcagtttctaataatacttgccgacaggcaccgcaaggaggaataggtgtgtcaagaaaatcattttctgtgcgggcagcaatggcaagtgtttttactgcttgatccggatattgagaattggcgtaaaacaaagtggtacgttctgcacaaagaccagatgggtaggctgcattttcttgattggttccggtaataacgatatcattttccaacagtgcggcggctccaacagcaaaatgtgagtaaggagcatagcttcttttcgttgcttcacacgcagcgtctatcagtttgcggtccttctctgttagttcgttataatggcaagcctctatgtttatttccagtttgatttgtttcatgatacgttcctctttgttttcctgcaaatgtaatgttttgtttttaatctcccaatgtttcttttctaaaatctggtttttaatttatttactttcttattgcttgtcagagttgaatgtgaaaagaataatatggttaccgataaaaaaggagaaagttgcaactttttcttttatttgtgcgtctaatgaatatataattaaaaaagagaaagattatgttagcaacaacaacacctactatcgaaggaaaacgtataaccaaatattatggcattgtaacaggtgaaactattatcggcgctaatctgtttcgtgatttttttgctagtattcgtgacattgtaggcggtcgttccggttcttatgaagaagtacttcgacaggctaaagataccgcgttacgagaaatgcaggatcaggctgctttattgggagctaatgctgtagttggggtggatttggattatgaaactgtgggggacagtggtagtatgctgatggtaaccgcaagcggcacagctgtcagaatagaagattgaggtaaagcagatgtgcctgttgcaatattttttaggtttattgcaacaggtacgtttgcttttactgtattagggtattcttaatatctctttggccttgtttttacttgaaatgaaatctagtgagttgacaatattatcgtaatttgttgtgtcagctatatggtctttcaatacttgtaacatttttaacttgtcattatcaaaagtataaagtgacataagtttaaggcattgtgcgcaacttaattttttatttataatggccttttccagagttgaatctttgaacacggaattttttgtttcattgtatatcttttcaaattcgttatcgtctattgaaccaacggtatggagggatattttgctggaatataggtctcctactgaagtttctttagctatttcattgtaggaatccatgcctgttacctttccgtttctaaattcgataattagaaatttgcaagacgttgcaattcctccgctctgatattcccattgttccaaagaaccatcgaaacgtcggaaatcgggttttccaagaagttggcctatttcttctgttgtcattccctgctgtaccttccatgctttctgcttgatacttcctgtggtatgacagccgacaagtgttatactgataacaagcaataataattgtttaaattttctcatatatttatgtttttgtgtgttgtttaggttgaattaccatcggtcagtgattcccaatattttacgtgcatcatcttgtttaaataaagaatccagtgtcttgatgatttcttttccattttcacggtctacaatgcggttggaaaccattcttaatactttcattttttcatcgtcccatgtaaatatggacatgagtcgggcagtttgtttacaggtgaagtagttgtttacaactcctacagataataattccatttggtcgtccttaaatgctttgttttttacttttttatagaggttttcaaaatcatgtggatttatagctttgtgttttggtctgtgcgggccaaaatgatcagggtggctgggtggaactaccgtaattatttcatttggcggacacactgcaactggaggcggagtaatgttgggctcaaaagaatccatgtttgttaccattccgtctacaaaatcgataataattaccgtgtttgcagctgtggacatattggtcttggtgtattcccattgttccgagccgttgtcgaatctacggaaatcgggttttccaagtaaatggctgacttcttcttgggacatccctctctgtactttcataatagtgctactagtagtcaaaccgcaactgatgactaaagtacaaatggttaacgctaataatgtttgtttcaatcttctcatttttttgtttttttgtttgtaacaaagataagttgggaaaaggtatattcttctatctttttccctatttatttttagggatttccctactgtttatatggtaattcttctaagaactgaaatttattgttaggaagattgagtttgaaatctttaaattcatattctggaagattggttgtatttttctcttgttggaaatgtgattgattattttaacttcatctataattaatgtaaaaactttattttcacttttaacttcttgttctcgggtggttctaacctataaacttttgacgaatagatgataaacgaagataaaattagggaagtatgggcttccgacccggaacggggatttaaattgttgatagatttttttcaacagcccatatattggcatatccggagattggttgtatcacatgaggatgcagaggatattttgcaggaagtctttattcgcgtctttcgccatcttcctcagtttagggaggaaagttcattgggaacatggatttatcggatagcgaccaatgagtgtctccgttttctgaatatgcgtaaagaacaagctgtttcggcggaagaagttcaggaagagttaatgaataagttgatggcgtcagattatgtggattatgagaacgaaatggcggtgaaatttcagcaggctattttgatgcttcctgaaaaacagcgggtagttttcaatcttcgttattatgatgaactggaatatgaagaaattagcaggattacggacacgaaggtggatacgttgaaagtgaattatcattatgcaaaagagaagataaaagagtacatgataaataattaaagataggatggaaaaggagtttgattttaagaatattgggaagcggatgccttatcgtacccctgatggctttttcggaaaaatgcaaaaacaagtattggagcgtacccaggctgagaggtttaataggcagaatagaataaaattgattattggggctactttagctattgcggctgtcatgttgggagttcttttctttccgatatctcaacctgtggcagaggagttgccttctcattcacttattgtttctacgaatttagacttttcttattcagatactttggatcgttatatagaatctatgtctgatgaggaattagcagaatgggtggaattgtctgaaaatgatatatttataaattgattaatcactaaaaacaaaaaaatgatgagaacaaaattttttttaatggtgttggcagccattgttatgggaagtcaggtaacactttttgcccaagaaaagaaagaaactaaatctgaaagaaggcagtttaataaagaacagatgctggaaatacagtgcaatcaaattataaaaggattggcattggatgacgcaacggctgctaaatttattccggtgtataaacaatacatggaagaaatgcaggctactcgtcatatgggagtttgtcgaaatgttgcaaatagaacggccgccgataaacagatccccaaaccggtccctacagatgctgaagtggagcaggctattaaggcacgtttcgcgcagagtagaaagatactggatattcgtgaggaatattataatgagtttcggaaatttctttctcctaaacaaattcagaaaatgtataatatggagaaacacaatggtgataaatttcgtaaagagatgaaaaaaagacaaggaatgaaaaagcagcatgatggaagaagacatatgtcacagggcgatgtgaagaagtaaatatgggtgaaatggggaaaaaatagtactttcattgtctttatggctttattcttttagtggctgctgtttatggtagccactattttgttttctcattggaagtatatatttttgtgaagctaacagtagctatttaattaataaaaataatatgatgaaagtaaagaaattaagtggcaaagttcaggatgcacaacaaataccgaccttatttgatcatgagaacataatgtattatcctattaatatagtgaactggaaagaatatccttatcaacctcaagtctcttttcgtatagcctatacaaatgatgctatattagttcattataaagtagtagaagatagtgttcgtgccaaatacggtgaagataacggtagtgtctggacagattcctgtgtggaatttttctctattcctgcgagagatggcgtttattacaatttggaatgtaactgtatcgctacgattcttttagcagcaggttcggagcgtagtaatcgagaaatggctcctcttgaaataacagatcaggtgaagcgttgggctagtttgggcagagaaacttttgaagaaaagataggagaatgtacttgggaggttgctttgcagattccgtataaggtattttttaagcataccattaccaagttggatggaatggttgtacgagctaatttttataaatgtggagatgaattgcaaaagcctcatttcttatcatggagtcctataaaaatagagaagccggattttcatcgtccggatttctttggacttttggaattcgaatgaaattcgtaattaatttaaaaagattgcatacagctggataaaaatggtaagtttgcaactatatataacggataaagtatagtagcgattttgaaacagttttatatgatgaaacatacgttgaaatttatattaatcgggttgctttgttgtctatgtaattttacagtgcaagcgcaaacccgtaaccggcagtatgaggaatatattcataagtataaagatcttgctgtcgatgagatgaaacggtatcgtattcctgccagcatcactttggctcaaggattattggaatcaggggcgggaaaaagtacgctggctcgtaaatccaataatcattttggtataaaatgtggtggtgactggactggtcgtactgtacggcatgatgatgatgcccgtaatgaatgttttcgtgcctataagcaccctcgtgagtcatatgaagatcattctaaatttttaaaaggacgttcacgttatgcatctctttttaaattaaaaatcaccgattataaaggatgggcacatgggctgaagaaggcgggatatgctactgaccctcgctatgcgtatcgtttaattgatatcattgaattatatgaattacataagtatgataccaaggatggtataaagtggatgaaggaattcccaaacccgcatcagccttatttagctaatgatttactttatattgtggtacgcccgggggatacatttaaaaaactttctaaagaatttgatatcagtcaacgtaagttgaggaaatacaatgatctttataaaggatatgtattgaaaccaggtgatattatttatttggataaaaagcatcgtcgtgcggataaggaacacatagttcatgttgtccgtgagggagaatctatgtattccatttcccaaaagtatggtattcgtctgaagaatttatataagatgaataagatgaaaccggaagattcttctcctaaagtaggtgatatattgcgtttgcgttagtcattatagtacggtaactgatgtttaaaaacgtacagggtgtccgatttcggacaccctgtacgttttgtttgttattgattatcaataagttgctttcttggcacggatgttgtttattctttagtacaaaaatgacaataataaaattacaataagttatggacagagaaatccctaaagaagtgcgtgataaggaacgcaaaaagaagttcattaaatatggtgcaataggtgtggcggcagtggtatgtatagctgtattgatttcgtttatgcgaagtagcgtcaataagaaagatttggtgttttcagaagtagacaatggaactattgaagtaagtgtcagtgcttccggtaaggttgtcccggcttttgaagagattatcaattcacctattaatactcgtatcgtggaagtttaccgtaagggaggagacagcgtggatgtaggtacgccgattttgaaacttgatttgcagagtacggaaaccgaatacaagaaattgctggatgaagaacagatgaaacgttatcagttagagcagttgaaagtgaataataatacgtatctgagcgatttatcaatgcaagtgaaaatttctgccatgaaattgaaccgtatggaggtagaacttcgcaacgaacgttatttggatagcttgggttctggaacaacggacaaggttcgtcaggctgaattgaacttcaatacaggaaaactggaattggaacagctccgtcagcaatacgcaaatgaatcgaaagtaaaagaggctgatttgaaagtgaaggaattggaattcaatattttctcaaagagtcttgctgaaatgaaacgtacattggatgacgctcaaattcgttcaccgcgtaaagcgattcttacctatattaataatcaggtaggtgcgcaggtggcggaaggtagtcaagtagctatcatttctgatttgagccactttaaagtggaaggtgaaatagctgatacatacggtgaccgtgtggcagcaggtggacgtgccatagtcaagattggcaatgagaaactggaaggaacggtaagtagtgtgacaccgttgagtaagaatggggtgatttcgttcattgtacaactgaatgaagataataacaagcgattgcgttccggcttgaagacggatgtatatgtaatgaatgccgtgaaagaaggggttttaagattggcgaatgcttcttattatgtcggtcgcggtgaatatgaattatttgttcaggatagtaaggatgaagtagtgaagcgtaaagttcaattgggtgacagtaattttgaatatgtggaagtcatatcgggattgaaaccgggtgacaaggtggttgtcagcgatatgagcagttacaaaaacaagaataagttgaagttgaaataagaagcagctatgacataaacaacaagataaaactctctcttaattaatacattgattgttacgggaaatgaagtgtcttttcttccttttcactcatttcccgaacataatttaatttgttcttaggctatgtcgtttttttgattgtttacttttttatattattcataatgcttgttggcattcttattccggtatacagcatcagttgtattagtccggtagatgtgttgtgggatgaatacgactgacaaaaacgatcatactgtccgttatcggacaatatattaaataataatctgttgaaaattaaatgtttattgctttggtatatcttttgattcataaaaataaaaagtgtataagattaacaatttaaataggaaaaattatggcaatgattaaattaaccggtatcaataaaatctaccgtaccaatgagattgaaacattagcactggaaaatgtaaatttggatgtgattaaaggcgaatttgttagtattatggggccttccggttgcggtaagtctaccttgttgaatattatggggttattggatgctcccagcagtggaaagattgaaataaacggtacttctgtagaaagtatgaaagataaagaactggctgcttttcgtaataagactttgggatttgtgttccagtcattccacctgattaattcgctgaatgtgattgacaatgtagaattgcctttgctctatagaaagatggctgccaaggagcgtacccgtttggcaaaagaagtgttggagcgtgtcggtttaagtcatcgtatgcgccacatgcccacacagctttccggtggtcagtgtcagcgtgtggcgatagcccgtgctattgtgggcaatcccgaaattatccttgccgatgagcctaccggaaatttggactcaaaaatgggtgctgaagtaatggagttgttgcataaattgaataaagaagatggacgtaccattgtgatggtaacccataatgaagaacaagccaaacagacttcaagaactatccgtttctttgatggccgtcaggtgcaataactggaggctacttcattttttctacggaccattaatgaaaaggtactataatgataaaaaaaacaataggacaagtaatttatcaattgcgtaaccaaccgttactaagtgcaattactatattgggaactgccctcgctattgctttgataatggttattctaattgtctatcaagcgaaaacggcggactatgctcctgaagtaaatcgttcacgctcgctttacgtcaaatgggagcgtacggtatatgacaaaaaagaacctaacagcgcaggtcattcccgaccttcattgtggatggctaaagaagtcttttatccgttgaaaactcccgaagctgtatgcgttacttatgaagccggtgaagtattagtcagtactccaggagctgatgaagaggtcaatacaccgttgttactgacagatgctgatttttggaagatataccaatttcattacttgtcgggaaaaccttttacccaggctgactttcagtcgggaataaagaaagctgttattgttgaaagtgtggcgaggcgtctttatggagatgtggacgctgctattgggaaacctgtacagattaattttactgattatactgtttgtggtgtagtagagaatgtaaatcgtttttgtgagtttgcatggagtgaggtttatgcaccttattcttcgaatgcgatagccaataaggtggaagcaggagaaactcagggaaatcatatcattactatcttggcgcatagttcagatgattttgagaaaatccgtaatgaggtggcccgtggagtggcacagattaatacgacactgggtgagagagaattgcaactgatggggcaaccggataacttccgtactcagttgaatcgtaaatttgccaactcgtatgaaaatctggatgcggcatattggaaatatggcattatgattattgttattttattggttcccgccattaatctaagcggattgacacatacccgtatgcgtcgtcggctggaagaattaggtattcgtaaatcttttggcgctacacagggagagttggtgtggcaggttttgaacgagaactttgtattgacattaatcggtgggatgctgggacttggactttcttatctgtgtctgtggctgatgagtgattggttgcttcagactgcttggggagcaacagctaccatgaatgtttctatggtcagtcctgttgtattttttgtggcgctttgtttttgtctggtgcttaatttgctttcggcatacattcctgcctggcgtgttgcccatactccgattgtcgattcgttaaatcaaaaactctaaggctatgctgattcatttattaattattataaagaataatcttcgtgccaatctgttgctgatggctggaatgttcgtcattgctacttcactgtggtatgctgtggattatgtgtatgctgtggtagtgaaccaacagaaatcattagggtttgattgggagcatgtatattatgtacaagcggccgtcttacccaatgaaagcgtggagtgtgacacagcaagtcggtctgatgatgaagtgacagctgaatatttggaattttataatcggctgcaacatcatccggcagtagaaagtgcatgttatactttgatgcatttccattatatatggaaaaacggtagtggaaccatgtcttatgatacattgaagaccagtgcgatgtatcgggaagtcactccttcttattttaccgtgtttcgtgtcagaggggctgatgaatgttcgcctgaagagttgtcccggcgggcatcacataccaatgattttgtggtgacggaaaatacagcttgtcggctgttgaatccggacataaataatatgactgtaaaaggagtggagctagccggtcggtttattcatagtggggtttccatgcgcgaggatgaaccagattcggtgcgtgtggccgccgtatgcgagaatcagaaatataatgaatattccaattggagtaaagccgtttatcgcattgtacagttgggacagggagattttaagataagctatggcagtattccttatcatgatatatttattcgtgtgaaggcagatgccgaccgtcctggctttgtggaatcattccggaaagagatgaagaaacagctgcgtgtgggtaatctgtatctggcggatatgcgtcctatgagttattaccggaatgaacatctagctgattatcgtagcgatctttatacttatttggccattgctggattctttttagctaatgcgtttttggccatattgggtactttctggttccgtacgcagcagcgtcgtgaagaactggccgtccgtctggttgctggggctacgccgcacaatcttcagactcttttaatgggagaaggctttctactgataaccatcgcttatattcctgctttggttgtagcttataatttaggtatttctgatttagtagagacatggcctgtagaatggagtttcacacgtttcctgataggagggctcgttacttttctgttactttgggctattgccgctatcagcatttggtttccggcacggcaggccatgagtatccagccagctgaggcattgcatggtgagtaaatcagatattcattttattaaaagatggaattaatgaaaaacggagatacatttgggatctatttggaaatatggaacattgtatctctgctttaatttatatatcaggaaatgaaatcgtgtgcgaaaatgaagttggtgttcattttcggacagtgtataataaagataatatgtttatattcagttttttgtgtctttggcatgactttggctagtatagatataaagtgtataagaaaataataaaatagaattcgaaaatgataaaacagtattacaagcaagctttggcacaactacgccaacatccgcttatcagtattatcggtattgtggggactgcgctgagtattttccttattatgttggtagtgatgatgcaacaagtaaaggtcgctcctttttctcccgagtccaatcgtaaccgttttttacatgtacattatatgagtatcagtcataaagattggggaaatgggacaagtaatggtccgatgagtgtacagactgcacgtgaagtatacaaatcgttgaagactcctgaggctgttactgtttattgttgcatgacggtgtccactcctgtttccctacctggtgcgcctgcgataggagctgatgtgcgtgagacagatgatacattttttcatgtgttcgattttcagtttacagatggaaagccgtatgatgaagctacttttacagctgggcgccctgtagctgttataacagagagcatatcacgtgccttgtttggttctattcagtctgtaggtaaagaatttctgctgagtcatgctccttatcgtgtagtaggagtagtgaaagatgtttcaactcttgccgatatggcttacgggcaagtatggattcctttcacttcgaccaacctgtctaatgacacatggagtgataaccacatgggaatgatgagtgtaactctgttggcgcatgaccgtgaggattttgatgagattcgtgctgaggctaagcgccgtatgaatgagtataattcaatacttgctgatcaagggtatacattgatagatcgcaaccgtccttatgaccaggaaacccaatcgatttcttttgctgccaatttggaaccggatttaaaagcggctcgtcgtgagcgtgtcattatctttattattctattattggttcctgccataaatttgagcagcatgacgcaaagccgtttgcgtcagcgtgtagccgagataggtgtgcgtcgtgcatttggaagtacccgcatagagatggtggggcagattgtgatggaaaatctcgtaatcactttgttggcaggggctatcggattgctcattagtatattattcgcttattggggcactgatatattgtttgcacaaccttatagtgttactctgaatgcgcctactgttgattccagaattttattgcaaccatctactttcctctatgcattgttgttctgttttgtattgaatttgcttagtagcggtattcccgcatggcgggcatcgcgtactaacatagtcaatgctttgggaggaaagatacattaatagatgaaaaattaagaatttaaaagaagagttagaatgaataagaaactattgacacagataaagaatgagtggcgttccaatctttggcttgttaccgaattgttgttggtgagcgttgttatgtggtatattgtcgattatatgtatgttaaggcagctgtttactatgagccacgtggttttgatatctcccattgttatttgatacaaatgggacgccttactgataaaagtcctgattttattcctaatcagacaaaagagcagcagcgggaagatgtgaaaggacttgccgagcgtcttaaatatcgtccggatatagaggcggttggttttggtcagaattcttatccttataatgggagtaacagcggtacggaggttagatatgacacacttcagtcgccgggatggactattcgacgtttagtaagtcctgattttgtccgggttttccagtatcatggtactcgtggggaaactcctgaacaattggcggagttgcttagccatcccaagaattttttggcttccgataatttatacaagaaacgttacggaagagatttgactccattggtaggaaaacagttttatttgtttggagatacgacggaaacctatacgctgggagcatcgttggaggtagtccggtattcagattatgagcaggcatggaacagctacagtatggtgaaacttttgccggagaattggtatgatgtgggacttgaattgtgtgtacgggtaaaagaagatcaggataaagattttataacccgtttgaaagctgatagtgagaagctatatcgggtggggaatgtgtttatagccgaagtgcgttcgtttgatgatatccgtcgtaactatcaacagtcacaaaccaattccatgcgcagctatattttgggtatggtttttttattgttgaatatttttttaggattgctgggcacgttctggtttcgtactcagcaacgacgtggtgagattgctttgatgaaatctttgggaggaacagaccacagtgtctttgtacgccagttggtggaaggattactgctattggttatagccactattccggctgtttttatcaattggaatctggcaaatagtgaattgaatgcttggatgaatggtactactattgaaggtggacgcttcataataacagttcttatctcctttattttgattgcattgatgattgtagtaggcatttggattcctgcacgtaaggctatgaaagttcagccggcggaagcattgcataatgagtaatttctttttttgttaaaagattttagagcatagcacaaacatgataaaactatatttcaaacaggcttttttccaactacgtgagaataggctcatcagcttggtctctattataggaacggcattggctatttgtatgatcatggtcatcgttttggtgttggaagtgcgcattacggattgtgtgcctgaggtgaaccgttcacgttctctttatatgaaagcgatgtctattcatcagaaaggagatactagtgataattcatcaaacggctgtatgtcacttacggtggctaaagagtgttttaaggcgcttactgttcctgagacggtaactatagtgtctacaggaggcaggatgcgtatttctgtacctgcgggaaaaacgatgacagtggataatcttgaaactgacgatactttttggaaagtgttctcttttgattttattgccggaaagccgtttacggctgccgatagtgaaagcggacttcctaaggttgtaattagcgcttctgtggcccggaatttatttggtacggtagaagcagtggggcgtacagtccaacttaacttggccgattatacggtagtgggtgttgtgaaagatgtatccaaactggctgtttcttcgtatgcgcagatttggatacctttcaattcaactgaaatagccaggaagtgttggtatgacaatgcgatgggaacttttcgtgtggtcattctggcacattcggagaaagattttcctgctatcagagaagaggtggaacgtctgcgtcagaaatttaatgacggattgcaggattctgaaatcttttatcgtggacaacccgatgatcgtttctcttttatctttcgtcactggggaagagagttacaggcgaaggaagcttatttgcactacctgttggtgattgttattttattgctggtaccggctataaatttgagtagcatgactttgtcccgtatgcggaagcgcatgtcggaaataggagtgaggaaggcatttggtgctactgccaatgtcttgttgaggcaagtgttttatgaaaacttattattgacgctcatagccggagcagtaggaatgcttttcagttatgcatgtacttttttattgaatgatttcttattttccaatagcgagaaccgtgcccaaataggagaaaccagtctttcggcagatatgttgttcagtccctggatattcttggtcgcattcattttctgcctgctcttgaatttgctgtcagcgtgcattcctgcctggagggcatcgcgcatgaatattacggacgctttaaaccaacgttagatcatgaacaggaatttattgaaacagatatggaacgagcgccgcagcaatgcgtttctgtggatggaactttttgtggtgtttgtcatattatggtatattgtggatgtggtatatgtcacattgagcatctataatttgccgatgggctttgatatagaaaatacgtatgttcttcgttttgagcggatgacttcgaaggcggctgcttatcagcctggccgtactatgaaagaagatgttgccgatttgcatgaaattgtaaacaggcttgcgcatcgtccggatgtggaagcagtcagcctctcgcaaaactgtataccttataatgacggtgcaaacagtttttcattttatctggatacagtcccggtacgtagtttgaaacgatggataactccggagtattttaatgtattccgttatcgcaatatagacggttcggatagtgaaagccttgctgaggcactgacaccgtccggcatggtcttatctgtgaatattgccgatgtttatcaggatgcaccttggcatggtaaggaacttttagggcgtagggtgcctgtttggcggaatgagccggaggcggagcacctttctatagctgctcttaccgagccggtccgttatgatcattttacagctccggatgattacggctcccgttatgctgctgtgtacctgacagatgaggtaatggaatccttgggcgaaacggtttatatagaagtttgcctacgtgttcgtgagggacagaatgatggattcatagaccgtttgatagtggatgccgaccgtcaatatcaggtgggcaatctatatcttttggatataactcctttgagtgatgtacgcactgcttatgaaacggattcggtgaatgagttgaatacgcaattttgtatcatatttttcttattgctgaatatctttctaggcattatcggaactttctggttccggacacagcatcggcgtgtcgaaattgcgttgcgtatagctttaggttctacccgttggggaatctgcggtcgtctgatgggggaaggagtctttttattgttggtatctgctattcctgcattggtcgtagcgtggaatttgggatatgccgaactggtggaagttacacgtatgccttttacggaaggtcgttttgcgattacaattctgggcactttcattctgattgctggaatgattgtcattggaataggataccctgcccgtcgtgccatgagtatcgaatcggctgaggcattacatgaagaataaataaaatgaagagataaaacgaatgaaacagctattattacaagcatttaatctgatacggcagaatcctttttatgctacaatcagtattataggaacagctgtcactatcgcttttgttatggtggtagtgatgatttatgacttccgtacaatggatatggctccggaaagtgatcggagcgatatgatgtatacaggttcgggaatgacctatcgtaagctggatcataccaaccagaacagcggtatgggacgcaaggcttttgaagcattgttttcagagctccctggtgtaaaagaggttacttggtatcgtggcgtttccaagaccccttgtaacttgtccgcttcgaatgagatattcaactattttgtgcggcctgtggctgataactggtttaagttctttgattatgaatttatagcgggacgtcctttcacacaagaggagtatgatgcccgtcggtgtgtcagtgtggtaaccgagcgtatggccttgcagcttttcggcacgacggatgtggtaggaaaagaatatcaaagtaatttttttccgactaaagtggtaggcgtggtgaaagatgtcaatgctattttccagacagcatacgctgatgcttttgttcctttctcattggaaaatgaagactattatgctacttggacagggggcttgggaggaatccgtctgggattgctcaaactgctgccggacactcgtcctgcagaggtacggactgaagtacagcatcggcaggatcgtttgaatagttcaacggcagaatatgctttcgagatgaacgaactctatactcatacggaatataccttttttcgtggaaaagatattagtgcaccgttggtttacagtatgttattgatggtcttgctgattgttcctgctattaatatctcaggtatgaccaatgcccgaatgcaggagcgtgtgacagagattgcagttcgcaaggcgtatggtgcatcacgtatttccattatggtgaggttgtttttagagaatctgtttacggtctttttgggtggaattttaggatatctgttttcgtgtgtgttggtttggctgggacgtgtatggttgtttggtagcggcgaggtagaattatcagatatcagtctggatggaggtttgttgttgcatcctgctttatttgtgttggttttcggcgtatgtgttgtttttaatttattgtcggtattgattccggtatggatggtcacacatcgtaatattgcgactaccatcaaaggagaataggaggaaagaaaaatgataaagagtttattcagacaaatgtggaaccagaggcacgccaatgtatgggtgtgggttgaattgattgttgttcttatcttgctatggtacagcatcgatctggtttataattatgaggctgctgcccatcagactaaaggatatgacacggagaatgtttttgatattcaattgaatattaagccggctttgcaaaatgattctgtattaatgagtcattctgctgaatatttggaacaaatctatcatttaatccaacaatatcaaggggtggaggaagcttgtttttattatgggacaataccttatacgggaaataatatgtatgagggatatgctccgcattcggattcgacccatgtggtaggctgtttcatccgttatgtcagccctacttatttcaaggtatttcgtttgcagccattatcaggctcatttgaggcggagcgttgggacaagaatgaataccccatgccggtgttgatgagtgaaacgttaagtgattccttgtttagcggacgcaatggagtaggggagacttgtttcaatccttattttctgaatagtgtgcaaccggaaactaattataaggtaatggcggtacttcctgctcataagaccgatgagtacgagcgttacgaaccttttatttatcttcccagtccgccgctgactcattggcatcacattgcggtgcgtgtggcttccaattccataccgggatttaccgaacattttatgcaggatatgcaagggaaattatctatcggcccttattacttatacgatataaattcgtatggcgatatgaaggaagctttcgatatagagcaaggaacggtgaattatctgaatactacctatgccgttatccttttctttgttttcaatatatttttagggatgctgggtactttctggtttcggactcgtaaaaaccgaagtgagatagctttgcgtatggcactaggttgcagtaggatgaatgtatttggttattatgtacttgagggcatccttctcttggtttcggctgccattcccgctgtttttgtttgtgcgaatatgcagatggcggatcttactgtgcatacattaatggaacctgcttggggacgttttttgctttgttttgtgtcgtccatgctgttgttggggataataattttgctcggcatttatttccccgcccggaaagcgatggggattgagccggcagacgcgttgcataatgaataatgttatttcattgtcacatgatcagcagtgttcgtatatgaatggagtgtccgatttcggacactccatttttgtcgtaaggtgttataaaacagtgaaatagttttttggcataccatttgccttacctttgataaaaagaataataacgcaatgaaaaaacaagtaatatctctatttttagcctttggcatatcgttggttgccggagcgcagccacaagaaaagcgacgtgccatcactttggaggaagccattactattgctcgtgtgcaaagtgtagatgcggccgtagctttaaacgaactgaaaaccgcttattgggaatatcgtactttccgtgcggatttgcttccggaaatgaattttgaagccactattcccagctataataagaagtataattcttatcagcaggataacggtgcttatacatttgtacgtaataattatatggaaatgaatggtgaagtttctatcgatcagaatatttggttgaccggtggtaaactctcattgaatacctctcttgatttcttgaaacaactggatggagataaatcaaaacgatatatgtctgttcctgtggcattgactttggaacaacctattttcggagtgaatacaattaaatggaaccgccgcatcgaaccggtgagatacgctgaagctaaagccgcatttcttactgcaaccgaagaggtaaccatgactactatcaactattttttcaatttgttgttggctaaggaaaatgtaggcatcgcccgacagaatttgaagaatgcagataaactgtatgaagtggctaaggcaaagcgtagtatggggcagatcagtgaaaatgatttgttgcaattggaactgaatgtattgaatgcccgttctacgttgactgaaaatgaaagcaacttgaaaagtaatatgttcaaactccgttcatttctagcattaggagaagatgaggaattggaaccggttgttcccgagacgattccgactgtattgctgaactatccggatgttttggacaaagcacttgccaataattcatttgcgcacaatattcgtcgccgccagttggaagcagattttgaagtggctaaggcgaaaggtaatttacgtgaaatcaagctctatgcacaggtaggttttacaggaacagacaatgaatttaatagtgcataccgccgtttgaaagataaccagattgtagaagttggttttaaaattcctattcttgactggggaaaacgtcgtggtcaggtaaagattgctcaaagtaaccgcgatgtgactgaaagcaagctacgtcaggagaccatgaatttcaatcagaatctgtttatccttgtagaacagttcaataaccagcagacccagttgcagatagcagacgatgcggacaagattgcccagaaacgttacagcaccaatgtggaaaccttcatggtcggtaaaatctcgacattggatttgaatgattcccagtcaaagaaagatgaggctcgtcagaagcatatcaatgagttgttctattattggtactattattaccagttgcgcagtttgacattgtgggatttcaataccaatactaatattgatgccgatttcgagaagattatcaaacaataggattttcactattcaattctgtttgaatataaaatggggttgtctttgtacttattaaaataataatttctacatttgcagcattatgatattaattatagacgatgacagtgccattcgttcttctctgagctttatgctgaaaagggcgaaatatgatgtgcaggccgtaccgggtcccaaagaggctattgaaatagtccgttcggttgcgccccagttaatcttgatggatatgaacttcaccctgtccaccagtggtgaagaaggattgactcttttgaaacaggtcaaagtgttccggcccgatgttcccgttatattgatgacagcatggggaagtatccagcttgccgtgcaagggatgcaggcaggtgcatttgactttattaccaagccttggaacaacgtggcgttgatgcaacggatagaaacggctttggaactgacttcacaagataagaaagcagaggttccggtggaagataatgacggcttcgaccgtagccatatcattggaaagagtaaagcactgatggatgtgctggccacgatcaagcggatagcgcgtaccaacgcatcggtcttgattaccggtgaaagtggtacaggcaaggagttgatagccgaagcggtacatttgaacagtccccgtagcaagaaaccttttgtgaaagtgaacttgggaggaatttctcatactttgttcgagagtgaaatgttcggtcataagaaaggtgcgtttacggatgccacagccgacagggtaggacgttttgaactggctgataaaggtacgatttttttggatgagattggcgatttggatttaagctgtcaggtgaaactgcttcgcgtgttacaagaacagacttttgaagtcttgggcgacagccgtccccgtaaagtcgatatccgtgtggtcagtgcgacgaatgccgatttacgacagatggtgcaggaacacaccttccgcgaggatttgttctatcgtattaatttaattacggtgcatcttccggcattacgcgaacgccgtgaggatattccgttattggtccgtcattttgccgacaaacaatgtgaatcgaacggtcttcccaaagtggaatttacttctgaagcgatggattatttaagccgtttgccttatccgggtaatatccgtgaattaaagaatttggtggaacgtaccttgctggtcagtggaaaggaaatattgactgcggatgattttaaatcacaataccagcatcctatagaacagaaggtgacaacgaatctgcaaggcatgaccttggaggagatagaaaagcagactattctacaaacgcttgagaagtataacaataatatgtcacaggttgccgtagccttaggaatcagccgggctgctctttatcgccgtttggagaaatacaatatacaagtgaatgattagcaaaaacggaaccggataaaatatgaaactgaaattcttgttcttctttttagcattactgttgacagcagtatggactatcctgctcgttcttacattgaaggaacgcggtgcgttgttttatataggagagggagttattacattcagtcttgtgtttctggtttatttctatcgcaaagtcgtgaaaccgcttgatatcatcggcaacggtatggagcttcttcgtgagcaggatttcagcagtaggctgactcctgtcggacaaaaggaagccgaccgcattgtgttggttttcaaccgcatgatggagcagttgaaagacgagcgccttcggttgcgtgagcagaatcattttcttgacctgctggtcagcgcttctcccatgggagttgtcatactgactttggacggacatatttccatgctaaatgctgcagctcttcgttttttggattattcttcggcagaggaagtcagaggccgattgctgtgcgagttggcttcccctttggccgaagaaatagaacgtattcccaaagatactactgaaacaattcgtctgagcgactccatgatttaccgctgttcccggctttcttttgttgacagaggcttctctcatccgtttattctggtggaaagtctgacttccgaggtggtgaaagcagagaaaaaggcatacgaaaaagtgatccgtatgatagcacatgaggtgaataatacgactgcgggcattacctctactcttgatacggtggatggcgctttggaatgtatggaggatacggaagacttgcgcgaagtgatgaaagtctgcatagagcgttgctacagcatgagccgttttatcacaaattttgccaatgtggtgaagattcccgagcctcaattacaatcagtggacttgaatgaccgcgtagccacttgcaagacatttatggaaacggtttgccgtaaccgtaagattacgctgcatcttgatttatgtaaagagaatcctgaagtgatgatggatacttctctgtttgagcaagtactagtcaacattatcaagaatgcggctgaaagtatcggggaaacaggagatatctttatccgtacttccgtatcacctacgatgttggaaattgctgataccggtgccggtatcagtaaagaggtggaaaccaaactgttcagtcctttcttctccaccaagcctaacggacagggtatcggtcttatttttattcgtgaagttttgataaaacatgggtgtactttctctcttcgtacctatccggataaactgacccgtttccgtatccgtttctgatgattttctaccactttaccacgctgatgcttccgcaaggaagtgaaaagggagggagggtttatagtaaatgtctttcgggtgtttctttttgtgctgttggttctttcgaaatctcagttcaaaatggaaactctttttattatgctaagtcgtccgcgatgaaaaatgtttaatcaggattgaatgaaatcggtttgtttggtttatcttcacaatattatgtgctaaataattaaattatgaaataccctatcggcatacagacttttagtcaaatccgtgaaaacggatatgtttatgtggataagaccgaccttatctaccagtcggtgagtagaggaagtatttattttttcagccgtccgcgccgtttcggcaaaagtattatgaagggcggaaagaggtgaggtaatatccggacaagcctgaaaatatcctgtagtttggaataagtaagtaacgttataaaatagcttgatacattattttattcatcgttatcagtccaaatccacaaaaaagttgggagcgtttatgccctcatgctctcactgtatatgtaacatgttgatcatgaataatttgtgtagttgtggtaaaaatagttgctctcccttatgccctcactaatctctcatgccctcactacgttttgaagcatatttctgtataacatgcttgttgtcagctatatattatttttttgtaggatattccggcttgatataaagtagggcgttttctggctttttatcgtaaaaagtgtgtgtaaagggtttgtacttctatggagtgtgatcgcaaagttcccggtatttccggcagcggtaaaaagatcaagacgtttttaaaaaagctcttgttcttttttaaaaaggccgttatctttttttgaaagttcttgatctttttaaaaaacgtccttatcttttgagatgaaattccggatcttacgcgaaaacctccaccacagagttttgcaaaactgctgccactgctatcactctttccactgaaagcaccatgagcaggacgtttcatagggtggtggcagcactttttttatatggtaaaaagggctgctgccaccacttttacctcttttctaccccaaaaagtccgtaggagggggaagaaacaggaggcggaggatgatcaaacgctgggaaaaggcgggaatacaggcacacagcacccggaaaccggaccggcagaatatcgtccaccaacgaacaagatactgactacatcctgatgggaatctgattgcggatcgccagaactatggttgaatcccgacaaagccatagttacaatctggtgaaaccttagttccagcctgatggaactgaagtttcaaccctacggaaccggttggaactgaaccttatggctgaatatgacgcccgtacaattaatataggtgctgaatacagcttttggaaagattatatcaatgcggtgatagagttcaaccgctgccgttacttttccggcggagtggtttttaaagtccacctgaaataataaaaggagtggctgtcagtctttgattttctttttatacacttcccctctgctcattacttccttaacgaaattgtaagtctctacccctcggaagtatccattcttacaaaccggatcattgaaatattcttcattacttttaagcaggatatagtcatctacgctattatcccatacatatttattcttgccatatttttcagccagtgccatggcatccagtacgtgtcctattccggcgttataagccgccaagacaaatttcatccgttcgttttcattttttattgcgttgaaagaacgggaagtggcagcgatatatttcacagcggcctttatactctcttccggattctgttctttaccgggaggaactcccatagcacgcgccgtccggggcatgagctgcattaatcctttcgcgcctgcccatgatacggctgtcgtatcaaaattagattctgtataggctagggaagctaaaatacgccagtcccaatctatttctttggcatatttcttgaatagagtgtcgaagtgtgaaatctttccgtctttgacggacaagatggaaccgtgaggtgtccgtttgcttatttcaaaataacgcttgctactggcctgataggcaggagaagttatattttcctgatgccatttagtagcagcttcacctagtagcggtgaggtcttacgtacggcccatgaggcacgttggtcaaaactgacagccaggtcaatattcagattggggtaataagtcttgtttaatttggcaaggtcgttatcacagatggcataatctatctcaccattggaaacctgcatgattaaatcctcggtggtgatgctgtcattattgacttcgtgtatcaatataccgccacccagttctttatccagattgatgagacgttccagatactttcctggttttacatagacctctttccctattaattctgtcacattattcagtgctttcttctttttttgagtattgcgttgtaccaatacctgatgggtgataatatcttccccgcaaaattctacactatctttaaactctttggtgacaggtagattataggctatcaggtctccttctccttgtaatagtttatggaccagatcacgggcattctgtgctacttttattttcagctttacgcccaatgagcgggtaaactgatcggccagctcatactggaatcccataggctcgccccgatagtcgaaataagaggtagaactgttcaaggtcagggctactaattctccgctgtcttttatttgcggcaaatcataatttgtcacttcggcagattgttgccggttgcggcacgctgtcatgcatatacaggcaaggactaatagccagacatttttcatcttcctaaaatcttttcaatatatagtttaaggatttcaatggccttttggttgttgcctccattggggataataatgtcggcatattgtttggtaggctctatgaattcgtcatgcatcggtttcagaatgttccggtatttgtctatcagcatttccaagggatggccgcgttccaccatgtcgcgggtaatcacacgcagcaaacgttcatcgggttcggcatccacgaaaatttttaaatccatcagatcgcgtaactctttatcatagaggctcatgataccttctacgatgatgacttccttaggctctacatggacggtttcgggcaggcgtgtacatattatataagaataggtaggttgttcaatgggatgtcctttacgtaattcggctatctgttgttcaaagagcggccagtcaaaagcgtcgggatggtcgaaattggtttgtttacgtatttccaagggaatggatgactgatcattataatatgaatcttgtggaatgactgcaacggaacctaggggcaggctctctatgatttttctaactacagtggtctttcctgaaccggttccgccggctatgccaataattatcataataatagaatgtattttaaaacaaaactgttacttttgcatcaggctaaatactttaagccctgtgtcaattacaaaagtaggataattaattaaaatatcaagtatggttaagcacattgttttatttaaattgaaagaaactctttcacaagaagaaaaattgaaagtgatgaatgattttaaagcggctattgaagctttgccggtcaagataggttttatccgtcatatatttgtggggctgaataccaattctgctgaaaaatgggatatttgtttggatagtgaattcgatacgctggcagatgtcaatgcctatgccgttcatccggatcatgtagctgctgccggcctcttaaaagaggttaaggctgatcgtgcttgtgtggattacgaattataaaagatagcttatgaaaaagataatcaattcctggaaggggatgaaaggatataattgctttggctgtgctcctaataatgacgccggagtgaagatggaattttatgaagacgggaatgaggtaatcagtatctggaaacctcagccacagtttcaggggtggattgatacgttgcatggaggtattcaggcggtgctgttggatgagatttgtgcatgggtagttttgcgtaaactacagactaccggtgttacgtccaaaatggaaactcgttatatgaagcctgttaatactaacgattcgtatattgtattgaaagcctccataaaggagaggaagcgcaatatcgtatttgtagaagcggctatttataataataaagaggaactttgcaccaaggctctatgcacttatttcacttttccgcaagagaaggcgaaggaagaaatgcattttttgagctgcgaggtggagcaagatgagataatacctttaatttgaaagaaaaaataaagtttttgcgataattatttgctgatatcaaatataaactttatttttgtcgcaaataaaaagaaaagactatggttagaacagctacacatcatcatcattttcctaacgaataactcggtgggctaagatgatattgtagtatgatgatatagggcttgccgaaaacggtaagccctttttattgccggttaataattaaaaaacagatagaatcatgcttagaattgcagtacagtcaaaaggccgtttgtttgaagagacaatggcattattacaagaggcggatattaaaatctccgcttctaaaagaattcttttagtacagtcatctaattttcctatcgaagttctttttcttcgcgatgatgatattcctcagtcggtggctggtggagtggctgatttagggattgtaggcgagaatgagtttgtagagagaaaagaagacgctgaggtgattaaacgtttgggattcagcaagtgccgtttgtcattggctatacctaaagatgtggactatccgggtttgtcttggtttgaaggacgcaagattgcgacttcttatcccggcattttgaaagatttcatggaacggaatggtattcattctgatattcatgtcattaccggttcggtagagattgctccgggaatcagtttggcagatgctatttttgatattgtaagttcgggatcgactttggtaagcaatagcttgaaggaagtggaagtggttatgaaaagtgaggcattgctgataggcaataagaatatgtctgaggagaagaaagagattttgaatgaactcttgttccgtattgaagcggtgaaagctgccgaagacaagaaatatgtcttgatgaatgctccgacagagcgtttggaagaaattatcgaagtgctgccgggtatgaagagtcctactgtgatgccattggcacaagaaggatggagttcggtacatacagtgcttgacgagaaacgtttttgggagatcatcggaaaactgaaggcattgggcgcggaaggtattttggtattgcccattgagaaaatgatattatagccggtccatacgtcaggcgagatttgtaaacttataaaagaatacatgtatgaagaaaataatatatcctgaaaagaaagactgggtggaaattctccgtcgtccggcattaaatacagacacgctgcgcgatacggttaaagaagtgctggataaagtgaagacggaaggagataaagcggtgagggaatatgaagaacgttttgataaggtgaaactggacttactgggggttactgaaacggaaattgctgaagcggaaaaggaggtacctattgaattgaaggcagctattatgctggcacagaaaaatattcatacttttcataattctcagcgatttgaagggaaaaaggtgcagactgtatctggtgtaacttgttggcagaaggctgttgctattgaaaaggtgggcttgtatattcccggaggcacggcgcctttattttctaccgtattgatgttggctactccggcacagattgcaggttgcaaggaaatcgtactttgtactcctcctgataaagaaggaaaggttcatcctgctatcttgtatgcggcaaaattggccggagtaaataaaatattcaaagcaggaggggtgcaggccatcgctgctatggcatacggaacggaaagtgtgcctaaggtttataaaattttcggtccgggtaaccaatatgtaacggctgccaagcagcaggtttctttgcgggatgttgcgatagatatgcctgccggcccttctgaagtcgaagtgctggccgacgagacggctaatcctgtatttgtggcagccgatttgctttcacaggcggaacatggagttgatagtcaggccatgctgataactacttctgagaaattaatgaaggaggtggagtatgaggtacaacgccagttggctttgcttaccagatggaaaatagccgaaaagtcgttggcaaacagcaaattgattttggtgagggatatggatgaggcaattgctctgacgaatgaatatgctcccgagcatttgattatcgagaccaaggattatatggaactggcagagcgtattgtcaatgccggatctgtatttctaggttcacttactccggagagtgccggtgattatgcatccggaaccaatcatactttacctaccaatggttacgccaaagcgtatagtggggtgagcctggatagttttatccgtaaaatcacttttcaggagattaatggtgagggtattcagaatatcggtcctgctattgaggtgatggcggctaatgaacaactgggtgcgcataagaatgcagtaaccgtaagattaaaaacagtataaagatgaaagatttgaaagaattgacgcgcccgaatatttgggctttgaaaccctattcatcggcacgtgacgaatataatggagcggaggcatctgtttttctggatgccaatgagaatccgtacaatacacctaataaccgttatcctgatcctatgcagcgggaactgaagaatatgatagctcctattaaaaaggtagaccccgatacgatctttctgggaaacggcagtgatgaggctattgacttggtatatcgcgcgttctgtattccgggggtggataatgtagcggctattgaccctacttatggtatgtatcaggtgtgtgccgatgtcaacgatgtagaatatcgcaaggtgttgttggatgaaaactatcagttcagtgccgacaaactattggcggcaacagacgatcacaccaaactggtttttctttgctcgcccaataatccaaccggtaataacctggatcgtagggaaatggaaaaattgctggatacttttcagggattggtgattatagacgaggcctattccgatttttctgatgcgccgtctttccttgccgatttagataaatatcctaatttgattgtcttccagactttttctaaggcatggggatgtgctgccattcgtttgggcatggcctttgcgtctaaagaaatcatctctattttcagtaagattaaatatccgtataatgtgaatctgctgacacagaaagaggctgttatgatgttgcatcggcattatgaggtagaacgttgggtaaagtcgttattggaagaacggacgcgtttggtcaatgaatttgtagaactgccttgttgtgagaaaatctatcctacggatgctaatttttttctagctaaagtgacagatgccaagaaaatatataattatttggtaggtaaaggtatcatagtgcgtaaccgtaccaatatttctttatgtcgtgattgtttgcgtgtgactattggtacacgtccggagaatgatatgttgttggaagcattgaagaattatgaatgttgaaatatgaagaaagcgttgtttatagatcgtgacggtacgttggttatcgagccaccggttgattaccaattggattctttccataaattggagttttatcctaaggtatttcgtaatttgggatttatccgcagtaagctcgactttgaatttgtgatggttaccaatcaagatggcctcggtacttcttcttttcctgaggataccttttggccggtgcacaacctagtgttgaagacattggagggggaaggtatcacttttgatgatatcttgatagaccgcagttttccggaagaccatgtgcctacccgcaagcctggaacaggaatgatgggaaaatatcttaccggtgattatgatttggctaacagttttgttattggtgaccgtgttacagatgtggaactggctaaaaatatgggatgtaaggctatcttgctgcaagataatatggatattctgaaagaaaaagaactggaatcctattgtgtactggttactacagattgggataaggtcgctgaatttctttttgccggagaacgtatagcggaggtccgtcgtactacgaaggaaacggatatttatatcagcttaaatttagatggcagcggaaagtgtgatatttctacaggtattggtttttttgatcacatgttggaacagattggaaaacatggtggtattgatcttaccattaaagtaaaaggtgatttggaagtggacgaacatcatactattgaagatactgccattgttttgggtgaatgtatttatcgggcattgggcagcaagcgtggcattgagcgttacggatattgcttgcccatggatgattgtctttgtcgggtagctttggattttggcggtagagcatggttagtatgggatgctgagtttcatcgagagaaaataggggagatgcctaccgagatgtttcctcatttttttaaatcattgagtgatgcagctcgtatgaatttaaatatcaaagccgaggggcagaatgagcatcataaaatagaaggtattttcaaagctttggctcgtgccataaagatggctgtgcgaagagatatttactattttgaagtaccctcaagcaagggatgtatttaagttagcttcaaagacaaagtaacttaacttatttgcccaactaagttaagttactttgtctttgaagctaacttacttttttatatggtttatagctcttcgcattctttcagccatgaagctgcacttgcatcgcttggcatacgccagtcacctcggggactgagtgatacggatcccactttgggaccatcgggcaggcaggaacgtttgaattgttgttgaaagaaacggcggcagaatatagtaagccattttttgattgttgcctcatcgtatgtatcacgaaaagcgatacttgccaggaagaatatcttggcgggacgaaaaccgaaacgtaggaattgataaaggaagaagtcatgcagttcgtatggccctaccaaatcttctgtcttttgtttgatattgccgttttcatcagcaggaatcagttcggggctgataggagtgtctacaatatcgagcagagtaatacgtgattcattatccatgtcattcaaagccacccaatttaccaggtatttgaccaatgttttgggaatacttccattgactccatacatagacatgtggtcgccattgtaggtggcccagcctagggcaagttctgaaaggtctcctgtaccaatgacaagaccgctcagttggttggcaacatccatcagaatttgagtccgttcgcgtgcctgactgttttcgtaagtcacatcgtgtatggtcatatcgtggtctatgtcattaaaatgctggatgcaggattccttaatgctgatttctttaatagtaacgcctaatgaagccatcagatggagagcattattataagtgcggtcggtagtgccaaaaccaggcatggtgatgccgatgatgccttttcgtggcaaattcaatttgtcgaaagttttggcacagaccaaaagtgccaaggtggaatccaaaccaccggaaataccgactactacagtcttgcagtgggtgtgtaccaaacgtttggcaagccctgctatttggatggcaaaaatttcttcacaacgctcatccaattctttgccctgaggaacaaaaggatgggcttctatactgcgtgtaagactaagatcgcgtgtgttaacaaattctgtactgatgtggatggcgggacgtcccgggcagttgccgatattggcggcaaaagtggtattggtcaaccgttcgccacgaagacgctctacgtctatttcactgatgactaactgttctttgaatgagaaacgttcagattcggtaagtaatgtgccgttttcatatatcagtccgttgcctgcaaaaacaacgtctgtagtcgattcgccgaaaccggatgaactgaatacatatcctgccaggcagcgtgctgattgttgactgactaatgaacggacataattatgcttgcctatcccttcattatcggcagacatattgaaaatgatttccgctcctttcaatgctaatgcggaactggggggaatgggggcccacatatcttcgcagatttcaatgccaaagcaagtttccggagtgtcgaaaagcaggttggcgctgaccggtacattttgtccgcagagacgtacattaccatctgggtggtttagagcagaggtaaaccagcgttgttcatagaactctttataattaggtaaatatgttttgggaacaatacccagtatttttcctttttggaaaacaacagcactattcagcagcgtggaattcataaccacaggcatccctacaatggagacgatatccatttgtcgggtattattcataatctgcattaaagccatttctgcttcttccaacagtaaagactgaccgaacaagtcggcgcaagtataccctgtaatacttagttcgggaaaaatgataatttgtactcctttcccgtctgctatggcaatttgagtttcaatctgttgtgcattaaatttgcagtcagccactttcactatcggaatggcagccgccactcttacaaaaccgtatttcatattatacctaattattatatatacttgcaaaattaatcattctttcccgatttatacccctaaataaaaaaaataaaaaaaagtacgtgatttatttgtttgttgcgaataactatctatctttgcacatgaaataaaattgtaatagttacaaaaagggaatatatgaagagttacgattatcttatcagttataacattaagccgtccgtacagcgcatagctattatggattatttgttggcccataaaactcatccttctatcgatgagatttatttggcgctatgcaaggacattccaaccttgtccaagactacagtgtataatacactgaaactctttgtcgagcatggagcagctttaatgcttacaattgatgaaaagaatgcgtgttttgacggtgatacttccctgcatgctcatttcctttgtaagaaatgtggtaaaatatttgatttgccctacagtaatgaagtgaagcaagtagagcaaattgatatgaatggattcaaggtggatgaaattcaccaatattataaaggtatatgccccgtttgttctaaagaagacaaagaaagaagttagaaagatagagagtagatgactaactaataaataaaatattgactaactaataaaaaaagaaattatgaaaaagtttatttgtacagtttgtggttatattcatgaaggtgatgcagctcctgaaaaatgtccgttgtgtaaagcgcctgcttctaagtttaacgaaatggtagaaacagaaggtggcttggaatttgcagaccaacacgttatcggcgtagcaaaaggttgtgatgaagaaatgattaaggatttgaacaaccacttcatgggtgaatgtacggaagttggtatgtatttggcaatgagccgtcaggcagaccgcgaaggttatcctgaagttgctgaagctttcaaacgttatgcttgggaagaagcagaacatgctgctaagtttgctgagttgctgggtgactgtgtatgggatacaaagactaacttggaaaagagaatgaatgctgagtcaggtgcttgtgctgacaagaaacgtattgctactcgtgcaaaagctttgaacttggatgctattcacgatacagttcacgaaatggctaaagacgaagctcgtcacggtaaaggttttgaaggtttgtacaacagatatttcaagaaataatatacgattttttatagtataaatggagagagggggagtaattattattgtcccctctctttttattggctatatttagattagagatgtataggccttgtttctcattctttcagtaatacttcttcaatagctttcctgaaagtagttttattggccgctcctataatgatttgcggctgtcccgttttggggataaagatgatggtgggcagtgactgtatccccatggcagcagataattctttttgtttgtctgtatctactttgtaaactacgatttgatctttgtattctttggccagactttttagcagaggggcaaccatacggcaaggaccgcaccatgtggcgtagaaatcaataactgccggtttctctcctttgtatttccagtcagtggaaccggaggtgtagtcaaatatattatccaagaacatttgtttgtccatatgtatgacttttccttcatttttatctgacttatctcggaaaggagtctgggcactgagatatcctgttaatccggtagttaataaaagacacgtgattgtttttttcatattttattcatattgggctagaattatgcttaaatcattggcacgcattacaccgctttgtcgccacaattgcttaccgtctttaaaaatcattagtgtgggaactgactgaatctgatagtatgcagcaatttctttatgtttgtctacatctactttgacaattcttactttttccccttttattccttttaattcttctaaaataggtttcatggctttgcaaggtccgcaccattcagcaaaaaaatcaactaatacagggatgtttgaggtgattaaatcttcaaatctttccataatgttctcctttcgttatttttattataataaaaacgtttatagtgtgttttttgtttaaaagtaagtgggtgtgtccaaattagtttttggaaatatgaacttataatctgaaatttgagcatcctaaaagactaaagaaagggtcgtatcattactccatacagagcttgatacgacccttttaagtgttataattactatctgtaacttttaggagcagtcatttttgttttgacaccgcttccttgtattataaggttgatgaactattatttttttacagaagagggagtataacgtgcattcagtccatcaatgatttcttgtgtgatgttgtatgccggattagcgtatagcaaattgtcaaatcctgtattgctgataattagatcatatcctttgttttgattataaattttcaagaatgaattgatagaatcacgtaactgcaagctgttcttttgattttcagaagctagttcgtcgcttagtttctgttgtagtgcctgcagttcttgttgttgcttcatcagtctcatctgttcttgttcagcacgttcacgtgtagcgaagccattattttccagtttgcgttggaattctttagcatcagcatccagcttctttgctttttcatttaaagtagtgcggatattttcttctttctgtatcatcacttcatttaagtcattccagaaattgtacttagtcaacagtgaatcgatttccacataagctattttcatgtttgaagaaccagcaacgccgacagccggagcagtggaagaagttgcagcgttgttgttgtcgctacattgtgcaaacactaacacgatggctagtgctagaaatccattcaggatgaaatttgttcttttcataatctttttcacgtattgtttattaattattatccgttttgttttgcttttcaatttcagctatggcatttttattaggcttgcgtgcttcacgatcttgtgattgtacacatcctactccttttttacggagtgccttattaccgcttacatgtgtgtttggaaactttccttttagaaagattccgatagacaataatgctatacagatagcaactattaacacagttataaggatagtatcaagcatttctattatttttgtggtgcaaagttagtgtaaggcaagggaaatgccaaatttattgaagcatttcgtatctgcggactaaatttgcggaacaaatatagaattttgcaatgatttagctttctcttttctcattaaaaaagaggaagtgtcctattaaagagaattatttaactattttttgcaaatttggaaactgaatttgcctaaacaacatgattatgaataaaaaggatttaaagccggcatctgtcttttattattttgaagagatatgtcaggtaccccgtccctcgaaaagagaggagaaaataattgcttatttgaaagccttcggtagaaaacatggtttagaaactaagacagacgaagttggcaatgtattaattaaaaaacctgccactccgggtaaggagaatttgaaaactgtgattttgcagtctcatatagatatggtttgtgaaaaaaacagtgatgtggagcatgattttctaattgatcccattgacacagtagtggacggtgaatggttgaaagccaaaggtactacattgggggcagataatggtatcggtgtggcgacagaattagctatattggctgctactgatatagagcatggtccgttagagtgtcttttcacagtggatgaagaaactggattgacgggtgcttttgcattgaaaccagggtttatgactggtgatattctgattaatttggactcggaagatgaaggagaattattcatcggctgtgccggtggtgcaaatactacagcggaatttacttatcagcctgtttctgctccacaggattatttctatttccgtgtaacggtcaagggattgacaggtggacactccggtgatgatattaataaaggtagagcgaatgctaataagctgctgaatcgttttctgactcagttggcttctaaatatattttatatttatgtgagattgatggtggaaacctgcataatgccatacctcgtgaggcacaggcattatgtgcggtacctatgaaggataaggaatcggttcgtgtagatttgaatatctatactgcagaactggagaatgaatatgctgcgacggaaccgaacttgagaaccgaactctcttctgaatccccttgtaaggaagcgatagatatgactactgccggacatcttctgagagctgtttacgctgtgcacaatggggtgtatgccatgagtcaggatattccaggattagtagaaacttcgtctaatcttgcttccatcaaacaggtagagggaaacaagattaaaatagtgactagccagcgcagctccattctttcatcacgcaagaatatgtccgagatgatccgttctgcttttcttttgggaggtgctgaagtaataactggtgacggatatccaggatggaaaccgaatacggattctcctgttttgaaaattgcgatagatagctataaaaaactttttggtgtggaacctaaagtaaaggcaattcatgccggattggagtgtgggttgttccttgagaaatatccgtcactggatatggtttcctttggacctactttgcgtggtgttcattcacctgatgaacgtatgctgatacctactgtagataaattctggcgtcatttgctggatgtattggttaatataccgacgaaataatttatatgaagaaaacaattctattcctttgtttgtgctacctggtaggggtgacgtatgcacaggaaccgttccgggtaatgttctataatgtagagaatttgttcgattgtcagcacgacacgttgaaaaatgattatgaatttttgccagatgctccgaaaggatggacgcaagcgcgctatcatgataaattggctaggatagctaaagttattattgccacgggggaggaaaatgtccccgatttggtgggactttgtgaagtggaaaatgatcattgcttgaaagatctgacagaaaactcgccattacgcgaggcgggttatcgctatgtcatgactgattctcctgatgagcgtggtattgacgtggcgttgctttatcaacgtggtacctttaaattagtagggaaaaactgtatttctgttccttataaggaaatagagcgtcggcctacacgtgatatacttcatgtgacagggcaggtagcttccggagatacattggatgtgtttgtgtgtcacatgccttctcgtgcaggcggtgaggagaagagtgaaccctaccgcctttttacggcgcagatattgaagatagcggcagattctgttatgaatatccgtcagcatcctaatgtaatgattatgggtgattttaatgattatcccactaataattctattgcaaaagtattgggggctgtggctccgaaaagtggagtgcaggccaagaaattatataatctgatggacgggcgtaaggagggaacctatcgttatcgaggtgagtggggaatacttgatcagctgattgtttccggttttttgttacaagggcatgatagtatgcgcacttcatatgataaggcacagattttaaaatatccgttcctgctggaagaggatgaaaaatatggtggtaatattccatcacgtacctattggggaaagaaatatcatggtggttatagcgaccatttgccagtgtgtgtggactttgaaattggaaaatagggagagattggtggttagtgataaatggactgcgctattatgccgcaggtgttaatcactaaccgctatatatttctattcatgatgataaggaccgttgttcaatatagtcatcgcccggtatagctgttctacgaaaataaggcgtatcatttgatgtgagaaggtcatcttggataatgagatcttttcttggattacatcatatattttgggtgcaaatccgtatggccccccaatgatgaatactaaccgtttgtttacagtgtgcattttgcgttctatccagttggcaaattctacggaacggaattcttttccatgttcatccaataaaaccactacatcgcccggcaacaaagctttcagaattaattctccttccttctctttttgttgctccatactcaggtttttggtattcttgagctcggggatgacttccatatcgaaagaaatgaagtgcttggtacgttccacataatcattgatagcggtgatataatgtttttcgacagtgcgtcctactactaataatgtaaatttcatacgttcttttctggtttactttgcaaaaatacggaaaatctctacctttgcctatcaattcataaaaaaacgataacattatggacgaattagtagtaaaagacttaatagacagactgatagacctgtcttttgctgaagatataggtgatggggaccatactaccttgtcatgtattcccgcagatgcaatgggaaaatcaaagttgttgattaaggaagaaggtatcttagctggcattgaagtggctaaagaagtatttcgccgttttgatcccacaatgaaggtggaggtgttcattcaagatggaactcacgtgaaaccgggtgatgtggctatgatggtggaaggtaaagttcagtcacttcttcagacagaacgcttgatgctgaatatcatgcaacgcatgagtggcattgctactatgaccaataaatatgtgaagaaactggaaggtacgaaaactcgtgtactggatacccgtaagacaactccgggtatgcgtatcatggagaagatggctgtaaagataggaggaggatgcaatcaccgtatcggtttgtttgatatgattctgctgaaagacaaccatgtggattttgcaggcggcatacacaatgcggtgtcccgtgctaaagaatattgtaaggcaaagggtaagagcttgaagattgaattggaagtgcgtaattttgacgaattgaatcaggcgttggcagaaggtgtggatcgtattatgtttgataactttacacctgaagatactcgtaaagctgtagagatagtaggaggacgttgcgaaaccgagtcttctggtggtattacttacgatactatgttaccctatgcgcaggcaggagtggatttcatttcttttggtgcgttgacccattctgtaaaaggattggatatgagcttcaaggcttgttaaggaaatgttttatgataagagagaacttcaaattttggatctttttttgaaatatgaatgacgtaagtggtacgaataaaattaaaataaattcgtacatttgcgtcattgatattagttttttttattttcttctttaaatcgggtaggtgtcattccttttacttgtttaaaggaggtactgaaatacctcggataggaaaagcctacctcgtaagatatttcgttgatattcatgttggtatttgtaagcaagtaaacagatttttctatgcgtagtttattgatatagtcattaacgcccaacccggttagaagttttaccttattatataaggatgctctgctcatagccattttatctgtgagaaacttaatggaaagttcctctccagccatattttcattaataagtatattgagtttggcgatgaattcctcatcttctttactgtttttcttttgagactgttctgtttctatccttttttcgtttttttcttttactagcctattagatgataattccgttgcaggaatgttttcttcgactggtattttttcttctttgttttttaagatgtcgttcaatatagcttgtaggaagtggttcatattgcctttcatatatttctttttccgtcggaaataaatgtagcctataccggctgtggtaataataaacaagatggcggctatgccgatgaaccagctggtcttataccaaggaggagtaacgattatgtttatcaatttttggggtgtggtatgattcccgtctttagtattgcaagaaacccgtattgtgtagttgcctgcggatagagaggataaatttaaagttggatcgtaagtttcaatcaattgtttgcttctactttcaattatgtatcggagcaggtatttttggaatatgtctctgttctttattcgaaggtggatggaaagagaattgtagttccaaggtatgtttattgtattctctttgattttttttaaataaggactaccgttaaggagaatgtcggacaggtatatttctggtatctgagtttcagtttcgggaatgtttgtgttgatttttaccaatccttcggatccacctagatagatgtaattcttattagattgtttttggtatgcgaataaaatttcgttagatgggaaaccatcagaactattccagatagtaaatttattttctttgataatataagaatatagttgattttgagcacagatccatagacgtccttttctatcggcaatgaggaaggatatgttattaaatagtttggtgtgtatgcgatggtattttcgacttttcaagtcgaagaatccaagtcctttgtcggttccggtccatattatatcgttgttgtcataagacatggaagtgatggtttcatttttttccaactcgaatagtaatcggatactgtcattttgttgatctacccaaaaagcttggtgagcgtattttaaaagagagaatttatcgttggagtatgatagacaaagtgcattattagagaagtcgtagtgacgatctgtttgcatctttgagaatgtgtggttatgtgtattatatgcatatgcattacgactgattatatatattttgttgtttgccacttgattggccaaaggaaggtaaccataaaaacattctttatagttggtctctttatctataatggtgaaaggacgatattgctgcgtctttttattgaacaggaaaatgcctttggtatacaaagaaaccattaattcagattcagatatttcagcaatggaaataactttatctccgtaggttgaggggaaatgggtaaatttgtcagtagaagggtcgtataggttgatacctcctccatcagttccaatccaaacttttccattcttttcttcgtaaaggctgatgattgatttttcactgagtccgttgggattgtttaaaacggcatctttatatgtcttaatgtacgtttctttaatacagaatatgcctccgcgtacgcttcctgcccataagtttttttcttggtctttatagagcaaggtgatggagtttactggtagggaagaatagtctcctactatatgttgaagttgtgagaattgttgagtatggggagcaaattggttgatgccacttccgtctgtagccaaccatagtttgccattgtgttctgttatgtctaaaatataattgttgtttaatccggaatttgtttgagtatagtgttcttggatttttcctgtttggtcatagcaatatagtccagatccataaaaggatgtgtaaatatgctggtcaagagttatgtataacgatgtcagcaggttaggactgcttggaataaaaagactaaattgttgagtttgacagttgtacgagtagattccttttcttcgggtacctactaaaattttgtttttatcgagataaaccattttttggattctataatctaccatgttgatattttttttcttttcttgttttttaatgtgaatgatctttgtttttttactatgatagtcgtagcaatatatggtattctcgctgccaaaccatattccaccttttactttgatagaagaatagatcgcttgggaaatgatagtattaaatcggtcctgttcggcatcataaagggctaaccctttgggagttgctatccaaagatttcctaatgagtcttctgtcagatgattgatataattactaggtagagagtggggatcgtctgaatggtgcagataggttttgattccctcttgagtataactgttcaatccattttgggtacctatccataaagtacctttatggtctagcaggatggattggacagtagcttgggaaagtccttgctctatagagagctgggtgaacgaataattgacactgtgttcggaagagaacaattttgtgtctgcccataagaataaaatgataattaaggtccgatacattgtattttttattttttgcaaaaatacattttttttcttttgataagaatttaaggattatttttcagtatgaagtaataagaatactaagatattttagaaataaaaattgagaaatatccccttattagacagaaatggacttgatttatacaatttctgatctttttagttgataaatagactaagtttgcacagttaaatttttaaaataagttttgtgaaccaaaattaatgtagtatgaaaaatgttatacttttattattgtcggtatgtggtatgcttgcttgtactcatacaccgaaatgggaattagtgtgggaagataattttgatggtgcggaacctgataccacaatatggagccgcatacctcgcggaagacctgattggcaaaatactcagtcatttgataatcgttgttatgaaatgcgtgatggttgtttaatattaaagggaattgtgaatgataatatggatgtagatacggcgaagtatctgactgggggattgtggacaaaagacaagcatgcttttcatcggggacgcatcgaagtaagagctagattgcatggggcgagaggagcatggccggctatatggactttgccttatgaaattgataaatatgtttggcctatgggaggagaggtagatattatggaacgtttgaattatgattctattgtttatcaaaccgtgcattcgcactatacttatacattggggatagagaataatccgaaacatggaggcactgcatccattaatcctgaggactttaatgtatatggggtagatttttggccggacagtttggtgtttcatgtgaatggaaaacgacattttgtttatcctcgtatcgaaacggaacaagaaggtcaatttccttttgatattccccaatatttgttgattgatatgcaattaggaggtacttgggtaggaccagtggactctacggatttaccagtggagatggaagtggactgggtacgtcattatcaatggaaataaagctattctgatatttgttgttgtaatacaaattataaataacctattaacttaattaaattgaaattatgaaaagacaaaggcaaaaattatttcgcgtggttttggcaggcgtcctgatgatattttcatttatggtatacgcacaggaacgtatagtgacaggtaaggtgtatgattcatccggtgagtctattataggagctagtgtaatggtacagggtactatgcagggagtggtgactgatatagacggtgcttttcagttgaaggtgcaaccttcccagtctttagtgattagctttttgggatatcaggatgtgatcctgccggtaggaagtaaaaataattttaaaattattttggaagaagactccaaaaagctggacgaagtggtggtggtaggatacgctactcagaagaaagtgaatttgacaggatctgttgcttccgtatcagcaaaagatattcaagatattccggtggctaatacaactactttgctgcagggacgtttgccaggtttagtactaactcagaacggtgcacaagctggtaatgataatccagaaatcaggattcgtggtattggtacctttgggaataataatccgatggtgttgattgacggggtggaaggtagtatttcacaaattgcagaaatcccttctgccgatattgagagcatttctgtattgaaggatgcggcatcggcagctatttatggtgtgcgtgctgctaatggcgttattttgatcactactaagcggggacaggcatcaagcaaagtgaagatttcgtattcaggtagttatactttgcagacaccaggtattgttcccgattatgtggatggttataattgggctttgatgaaaaacgaagtgagcactggaactttttcaccggaagctttgcaaaagttgcaagacggatcagatccggatcattatgcaaataccaattggctggatgctgtattgcgtaatgctagtatgcaccagcatcatctgtctgtatcaggaggtaatgagaatacccgttttatgacttcggtggcctattccaatcaagatggtatcatgatgaagacaggagtagaacgcttttcttttcgttcgaatattgatactcgttacaaacgttttacttttggattgaacttatccggtaataagaataatgtgactactcctgctgtcgcaccttccggcgaaggtggaatcatgcgttatgtatcctggtttactcgtcctactgtgccggtgatgtattctaacggacactacggctatgtagatggttcgtcattgagtgccgaactgatgaagaatcctgtagagtcaatgtctttagggcaccgcagcaatgagtattggcgttttaacggtaaggtttttgcaggtattgatttatgggacggattgaagttccagaccagttttgcttatgcttttgatttaaatgcaacgaaatcttattctcccaaatctcctgcccgttatgatgcagaaggaaatattagaaaagcggcaggggaaacgaataaggaggaggattattggtatcgcaatgcaacatggacgagtgagaacctgttgacttataacaaacaatttgataaacataatgttaatgtgttgttagggcactctgttattggctcgcgcttttataaaacgactgcttccatacagggctttcctacagaaaatatttatgaacttgatggaggaacaattaatccgggtgcaaaaggcaattcggaagaatataaactccagtcattttttggtcgtgtgaattacggttatgatgaccgttatttgtttgagttcaatattcgccacgatggttcatcacgtatgcctaaagccaatcgttacgctacatttccttccgtatcaggaggatgggtattttcgaatgaagaattaatgaaagactataaaaacttctcccttggaaagttgcgtttatcatggggtaagttgggtaaccaggaaatcggtaattatgcttatgcggctactttgggcgcaagcggaaattatttctttgaccaaggtggggacaaacaggctggtatggtacagacttctgttccaaatgaagacatcaaatgggaaacgacccgctccatcaatgtggcccttgatcttggattctttaataataggatacagactacttttgaatggtttgataagaaaacttctgatatcttgatgcaattagctatgccaggcatattcttaggttctcttaatgctccttatcagaatgtgggtgctgtccgcaatcgtggttgggaatggaatgtgaattactcggatagtaaaggcgattgggtttggaatgtaggtttcaacttgtcacacgtgaagaacgaaattctggaaatgggcggtttggaagaaacaataagtgggcaaacaatcaatcgtattggcaatcctattggcgcttattttggatataaagcgattggtatgtaccgtacagaagctgatttacagcgtactaattcaaaaggggaagtcattaaacaaaatggtgtggctcctaaattgggcgatattatgtatgctgatttgaatgatgatggtaatattactgctgatgatcgtgatattattggcaatccttttcctaaatattcttatagcttcaatttaggagcttcttggaagaattttgacttgtctactttttggcaaggagtgggaggtatttaccgttacagttgggaaacttctaccgatattcgcggtaacttaaccgaacgttggttggatcgttattctgccggcaacgtaaatgcttctatgccggcattgggtaatactatgaatgattcttattcttcattctggttagaaaattccagttacttacgtttgaagaacttggaattcggctatacattccgtcagcctggacttgctaagatgggtgtttccagtgtccgtgtttattttgccggaagcaaccttttgacatttacgtctttgaaaaactgggatccggaaaaaacatcgggtgatgctagaaatgacgtacatcccaatatgcgcacttattcatttgggctaaatattcaattctaacttataaggaggatatacattatggtaaaaagtacaaaaaatatatgcagagttttatttttttctggagtgttattggttaccagtgcatgttcagatagttttttgcagacggattctccgaatcagccttctcaaaccacttattggcagaccgaatcggatgcattgatggctttgacagcttgctatgatgccatgcagagccagaatttatatgatgacaatattgatggctggaagtttggatttctaggacgtgaaaccagtacggataatggagaccacacatggggtgattggatgctgggaagttctatctcgaaatgtgcttcttccactaccgatgaatgcttttctatgtactggaatgctaattatgaagtgattaagcgttgtaatatgttggtagagaatgtggaacgtattccgatggaggctgaaaagatagatgcatacaaggcggaagcaatagcattacgagctttgatgtattgcaatctgacctccgtattccgtgatgtcccttatctgacgaaacctttaactttggctgaagcacaggctcccaaggcggaacgtagccagattatttcgtccttgctggaagatttgaagacttggattcctaaaataccagttatagggaaagcgcaaaaaggacgtatgtcccaagaagcaggttatgccattatgggacgaattgctctttttaatcaacgttgggacgaggcaataacggcttataaaaatgtagtaggaaaagtgcagctttttaagtcgggtgacggaactgattatgctgccaattatgctgatttgtttaaagagcaaaatgaaacggcagcagaagtattgttgagtgtccattttaaaggtccgggattaggtgaaggaagttgctttggggtttgttggtctgctccaatgaatgctattgaaggttctatgaacttgtgtgatgatttttattgtatagatgggttgcccatcgataagtcacctttatttaaaggaagtcttgttcaaggagcccatacgaaggctaatccggatatgggacgttatgagaatcgtgatcctcgtatgaaaggtacattgatgttacctggtatggaatggaacggaaaactgtttactaataatttgccggcaagttctacctgttgtattcgtaaatggtacactccagaagatacagttaatgaatatgacggtagtcttgacttctatgttatccgttatgcagaggtacttttgtcacttgctgaagctatgattgagaaaggtggttatccacaagccgaaataacaggatatattaatgaagttcgtgctcgtgttggtatgccagcggtagaagtagtggaaggaactaatttgaataaagaagaattgcgcgccattgtacgtcacgaacgccgtgtggaattggcttttgaagatttgcgttttgcagatctttaccgttggggagaatttgaaaatgctcaaaagcgtatgcagaaagaccagtcattctatggctttggagtagtttcgcggggtaatcttcgtggtgcgcaagatttggtttggcctattccgcaaggtgagattgatacgaatccgatgttggaacaacatagtgaatggaaataagaatgattgaattatctattgtaatataactgtgatgaggtaagagattgttaaaaggtattttcttgaaataaaggacaagtatgtggtgataaggctgcaacttgtcctttatcgtttgtttcctattatatatgttctatttcataacgtagcatattttgttaaattacaatgtgatgttatttatcttttcgtctctttgttttatctttgtcgttgaatattataagtaattaagtatatgaagaaaaagaatgtttttaaatggtggggagttgttttgttattatgtatgtgttctgttcatgctgaggcgcaggatttgaaatctatattgacaggagtggcaaaggcggcaattggtaacaaggctactacggctcattctattgtggggacttggtcttatcagactcctgaatgtcagttcgagagtgatcagttactggcaaaggctggtggagaggtagcggccaaagaagtggaagaaaaattacagactatatatgataagattggtttgactagtattaagtatattttcaaggaggatggtacttattcatatatattgaaaagacgtacggtaagcggcacttatgtttttgatgaggaagctaagacgattattatgaaaagtaagttgggcatacagacggtagcttatgtgacagtgacaggcaatagtatgagtcttgtgtttaatgccgataagttgatgtctattctaaaggtgattactggagcggcttccaaagtaaattctacagctgccactcttaacagtgtagctgaagcttatgacgggctgatgttaggatttgaattgaaaaagtagatgctttttgtaaaatatgggatacaagtcttttataaaagttgaaaaattgtgattggaaataatgtttaaggataaaaccgttttaaccttattattatggttaaaacggtttttttattaacatgtattgtttttgtatatactggtcatgaatgtaatatattgcatatatgtgagaacggtttattcttgctctttcagtgctgcgaaaatcaaaccttccagttcttccgccagttcggggttatcctgaatcacttgtttggaagcgtcacgtccttgtcccagtttggtttcgttgtagctgtaccatgaaccgcttttcttgatgatgcctaaatcagcacccaaatcaatgatttcaccagctcttgagataccttcaccaaacatgatatcgaattcggctttacggaaaggaggtgccactttgtttttcactacttttactttagtctggttgccgattacttcttcaccatctttcagttgagtggagcgacggatatccaaacgtacggaagcatagaatttcagagcattaccaccggtagttgtttctggattaccaaacatgacaccgattttttcacgcaactggttgataaaaatacaagttgtattggttttgctgatggctgacgtaagcttacgcaaagcctgagacatcaaacgcgcttgtaaacctactttgttatcacccatatctccttcaatctcagcttttggagtcaatgccgcgacagagtcgataacaatgatatcaatagcggatgatcgtattagctgctcagcaatttcaagtgcctgctcaccgttatcgggttgtgatatccataagttatctacatccactcccagtttggccgcatagaaacggtcgaaagcatgttcggcatcaatgaaagctgcaatgccgcctgccttctgagcttcagcaatggcatggatagccaatgtagtcttaccggatgattcgggaccataaatttctatgattctacctttgggatagccgcctacccctaatgcggcgttcaaggcgatagacccggtaggaatcacttccacttcctgtacgttgtcatcacccattttcatgatagagcctttaccaaaagttttctctatcttatccattgcagcttgcagtgctttcagtttttcactatttccggcacctggagctgctgagaatggaatttcttcgttatctttttttgccataaatctgttggtttataaaatttgttgtgcgtgttcttttgttttcacctctttgggagagatgatacgttcaatcacgccttcttcgttgatgatgaaagtcgtacggaatatacccatatatttacgtccgtacatacttttttctccccatactccgaattgttctaccaacttcttgtcggtatcggcaataagagtaaagggcagctcgttcttttcaatgaatttctgatgcgatttggcatcattcacactgacaccgattacttcataaccatgggcgcgcagttccgcataattatcacgcaagttacatgcctgggcagtacaacccgatgtcatatctttaggataaaaatagagtactatcttttttcctttgtaatcacttaaacgaatttcttctcctttttcgttcaagcctaatatttctgggactttatctcctatgttcatttttttagtggttaatgatttatggttattgtggccgcaggtatgaattacttaccatgggccgttaatcactttttaaagttctaaatcaccatcaaatacttcatgccaaggcagcccttgtttgttcagttgttccataaatggatcgggatcaaactcttctacattccatactcctggacgtttccacaatccttgcaggaacatcatggctccaatcatggcaggaactcctgttgtatagctcactccctgcattccagtttctttgtaagcttcttgatggctacagttgttgtaaacatagtaagtacgttctttgccatcctttacgcctcggatgcggcatccgatagaagtttcgccttcataattttctcctagatcctgtggattggggagtacggcttttaggaattgtaacggaacaattttcactccgttataatctatttcgtcaatacgggccataccgatattctggatgacacgcagatgagtcagatattcctgaccgaaagtcatccaaaagcgagcacgtttgatagtcgggaaattcttaactaatgattccagctcttcatgatacagcaagtaggaatcacgaggaccgatattgggataagtcagatccttgtggtattccaatggtttggtggtcacccatttgccttcttcataataacgtccgttctgagtaatttcgcggatattgatttcaggattaaaattggtagcaaacgctttgtgatggttaccggcattacagtccacaatatccaagtagtgcatctcgtcaaaatgatgttttgcagcgtaggctgtataaataccacttactcccgggtcgaacccacaacccagtatagctgtcagtcctgcgttttcaaaacgtttcttataagcccactgccaactgtattcgaaatgagcttcatctttcggttcatagtttgctgtatccagataattcactccagccttcagacaagcttccatgatggtcagatcttgataaggcagagctacattgatgacgatttcgggtttgaaactattaaacagggctaccagttcgtctacattgtccgcatctacctgtgcagtcttaatagctggattgccgatagcttttacgattgcatcacattttgattttgtacggctggcgatcatgatgtcagtgaatacatccggattctgagccactttgtgtgctacgacagtacctacaccgcctgcaccgataattaatactttacccatttgctgttttttattcttgttaaaataaaatgcccggcaaacattaccgttcacagggcaaagataacaaaatattttgggtattagttgatacgatctagtttcttattggtgaaatctaatgtttttctttcgtaggaccatgtttcatggctacccgtgactatatgaatgcgtatgggattacccaaagccaaacgacattcgtcggttgtcattcctttctgtaccttaccgcggcttatcatgttccaaacttcttctgtgatattcggatacttggctcgtaagttacctatgccgaatagaaccgtaaaataattgtctgattgtaaaatcacatcaactacactcgtatgggtgaatgtagcttttatcttataattctttccatctatgtcttccagctctaaaaagatgtaaggggagttgttttgtgagattatatttttgatggtgaattgtgtatatcggggaagtctcaccggagtgtctgtttcatccagacattccgtttccgctttcagatagacaggttttttcccatatttgctcatcaggttctttgatttttttgtatttgcatcactgaagctaaatgaatttggaaaatatttatttttattttccataataaaatcactgtctgccatgccgcaattagtctttgatatagctaccggctgatagtaggtgtttcctttcttgtcttggaatacgatttttacagggtatgcgcggctgcccactctgacagctgttacagttacttcttcattcataccaatcgggacttctttatagcccgatgtgctgttggggtcatctatacgtactttgttggtacgcatatataaggtttgtctttccagcaactctttggctatgtccacatcacccaggtaggcaagggtagggataccagctttgggctttaggcaatattgttccaaagtggtgtttttaagttcgtgataatattgttgcccttcacattcaaagttaaaatgtacaaaaccccgttcggtaatttccgaacctagatattcaaaaattttatgttttaaaatctcctgtatccacctccttattagtctccgtcgatttaaaaggaggaataatgatgtctttacgttccggtatcaccatgaatttcatgcctggtgtccagtcacacaggttgtaatgcttgaaatgatcgtttataaactgtttttccaaagactctacggaaatacttgtttgttgtgaagtagtcgtgactatatatccgttttgtgcataagtgcataagctacagcttgttgccccaattaaaatggttaaaaactttttcatcgctttaagtgttagtatatataaattgatacaaaggtataaaatttttgtgtataattgctatagtgaaaaataaaatggttagttttgcacactaaactaacagatttaacaaaaaaataatatgaaaaaactagtattagaaatgatggctatttgtgccggagcattgattgtatcttgtggtagtggaaagaatatgttgtctgtttcttctctggatggggaatggaatattacagaggtggatggacaaaagatatctacagagagaatgcctttcattggttttgatgtagctcagaaacgtatttatggaaatagcggatgtaaccgtatgatgggaagttttgaagccgactctctgaagccaggtacattgaagtttggacagataggaagtacccgcatgatgtgccctgatatgaagactgagcagatggtattgggtgcattggataaagtgacttctttccagacggtttctgacaagcctagtgtgataactctatgtaatcaagatggtcagccgttgatgactttggaaaagaaggcggctccggaagtgtcactgtctgatctttcaggagaatgggttattgaattggtgaatggaaagaagattgtaggtacggctgaggtaactccttttatcggttttaatttggatgaaagccgcatttacggtaatatgggctgtaatactattaatggtgcattaacgcaggaagatggaaaacccaattctttgagatttgacaatgttgctactaccatgatgatgtgtcctgatatggaaactgaaactattgtgctgaatgctttgaatgaaacaaaaagtttcagcatgaaagataataaagtatacttattaggtgaaaatggaaatgaattgctggtgttgaagaaacgataatccatatacattcaaatagatatggtcggcctattttctcataaacgagaaaataggccgattgcatttatggcattatggtaggatgctgacaagtattctgtttggtggaattctgacattcttgccttatataaatccatctaaaagtatcatataacaaataaatcagtcattttgtcagcctttgtcacattcttatttttggcataccgtttgttttatgaaggacgtgcggttggtgcaccaaagaaaaaaagaaatccttcgtgaaccattcgccaagaaatcagtttaattgaaaacaaataaataaagatatataattatgggaaagattattggtattgacttaggaaccacaaactcatgtgtttcagtatttgaaggtaatgaaccggtagtaatcgcaaacagtgaaggtaaacgtactactccatctatcgttgcatttgtcgacggtggcgaacgtaaagtaggtgatcctgcaaaacgtcaggcaatcactaacccgcaacgtactattttttctatcaagcgtttcatgggtgaaacttgggatcaggtacagaaggaaatagcccgtgtcccttataaagtagtgaaaggtgacaataataccccacgtgtagatatcgacggacgtctttatactccgcaagaaatttcagctatgattctgcagaagatgaagaaaacagctgaggattatctgggacaagaagttacagaagccgttatcaccgttccggcatacttctcggactcacaacgtcaggctactaaagaggctggtcagattgcaggtttggaggttaaacgtattgtgaacgaaccgacggccgctgccttggcttatgggcttgataaggctcacaaagatatgaagattgctgtgttcgaccttggtggtggtacatttgatatctctatccttgaatttggtggtggtgtgttcgaagtactttctactaatggtgatactcatttgggtggtgacgatttcgaccaagtgatcattgattggttggtgcaggaattcaagaatgacgaaggtgcggatttgacaaaagacccgatggcaatgcagcgtttgaaagaggctgcagaaaaggcaaaaattgaattgtcttcttctacttcaactgaaatcaacctgccatacatcatgcccgtagacggtatgcctaagcacttggttaagactttgacccgtgctaaatttgaagctttagctcacaatttgattcaggcttgtcttgaaccttgtaagaaagctatgagcgatgcaggtctgagcaactctgatatcgatgaagtaatccttgtaggtggttcttctcgtattccggctgttcaggaattagtagagaaattcttcggcaagactccttctaagggcgtgaatcctgatgaagttgttgctgtaggtgctgctgttcagggtgctgttttgacagatgaaatcaagggcgttgtattgctggatgttactccgttgtcaatgggtatcgaaacattgggtggtgtaatgactaagttgattgatgcaaacactactatcccggctcgtaagagtgagaccttctctacagctgccgataaccagactgaagtgactatccatgtacttcagggtgaacgtccgatggcttcacagaataaatcaatcggtcagttcaatttgactggtattgctccagctcgtcgtggtgttcctcagattgaagtaacgtttgatattgacgctaacggtattttgaaagtatctgcaaaggataaggctaccggtaaggaacaagctatccgtatcgaagcctcctctggtttgagtaaggaagaaatcgaaaagatgaaagctgaagctgaagctaatgcagaagcagacaagaaggaacgtgaaaagattgacaaattgaatcaagctgattctatgattttctctactgaaaatcagttgaaggaattaggtgacaagttgtcggctgataagaaagccccgattgaaactgctcttcagaaactgaaagatgctcataaggcacaggatttggctgctattgatactgccatggctgaactgaatacagcattccaggctgccagcgctgaaatgtatgctcagagtggtgcacaaggtggcgctcaggctggtccgggtgcaggtgcaggacaacaggctaatcaaggttcttcttctaataacaaagaagatattcaggatgcagattttgaggaagtgaagtaattcagacaaggacataaataataagcaaaagcgtgcagtttatcagaactgcgcgcttttgtgttttttattgttatatacttgtcgatataaggacactgagttctttctctttaattcttaagaatctatttgccattacaagtatttaagtcctcattaaaatataaatcatgatattatatttttctttgatgatttatttaattaacctaggtaatggcaaatatgagattagtaaaattaaagtatcgtccgagtaagggcgttttcgtttttgaatacatgcaggagcagatagagcgtcttagagggcaaggaaaagaacggacagtcgaaacatatcagtccgcattgaacagcttcatgaagttccgtgacggcatagacttatgttttgatgagatggatgcagatttgatggaacattatgaaacggagatgcgctccactcaccatttaagtcgtaatacaacctctttttatatgcgtattttgcgttgtgtgtatcgcaaggcagtgggtgagggactggcccttcctgcagatccttttgagaatgtatatactggtgtggacaagacctcaaagagagctgccaccctgacagatatcaaacacatcaagcagttggatctttccgatcataaatcgttggaatttgcacgagatatctttctcttttctttctatatgcgaggaatgtcttttatagatcttgcctatttgcgcaaaaaagatctcaatagtggctttgtgagttatagccgtcgtaaaacaggtaagaaactcattatacggtgggaaaaacagatgcaggagattattgacagatacggagattcggaaacacaatatcttttacctattatagaacgagaagatggcacggagcgcagacaataccggaataaaatgttgctggtgaaccgtaaattgaagaagattgcagcccgggcaggattgaccacaccacttactatgtatgtagctcggcattcctgggcaagtatagccaagacgaaaaatatctcgattggtattattagcgaagcgatggggcatgattcagaaactactacacaaatctatctttcgtctatacagactaatcagatagataatgcaaatagaaatattttaaaagatctataagaaggggaatatttgaattattttgaaattaggacgcactcttatatagagagcgtctatcggctgcaaaggtatagatttattttcattttctagcatttacagactgtaaactgataaaaaagttttttttctctctatatatatcataaacttatgggctgatttaattcatacaacttactacattaatggaaatcagaaatttaagaaatcggacgctctctatataagagtgcgtctgtttttagtcggattattccactatgagtattgtaaataacaagggcaaagacatgccacaacaaattttgggaacgatggttcaaaagaccgacgacgccgtaggcatattccgaaatgatcaggaaaaaaagcattggtatgtggctgttgtaaataacagaagtgaaaaagcctgtcaggatagattacgaaaacgtttgaagaacgaaactgatagtgagaaagcttatgaagtttatgtccctatccaacaggagatgagtattcgtcatgatggtaaacgtaaaaaagtggaccgtattgtttttcctgctcttgttttcattcgctgcacagattcagtaagacggaaagaaatagtctgccttccttatataaaacgtttcatggttaacatagccggttcttcccgaaatacttgccgtcccgtagctattattccagatcatcagatgtacagcttgatgcgtatggtcaatgatgccgaagaacacgtcactattgagtcatgccctctgcatttgggcgatcgtgtccgtgtaaacggtggcaaactggtaggattggaagggaatatatgtcgtgagatagatggttctactagtctggttgtaaaaattgatattcttggatgtgctaaagttaccattgctagagaattgctggaacctatagcggaaaaaaactcagttaacatataaattatatattgacatacaatgaccatagcagtagactttgacggtactattgttgagcacaagtatccggcaatcggcagggagttgccgtttgccattgagacattgaaaaaattgcgtgacgaacatcacaggttgattctatggacagtgcgtgaagggcgtctgcttgacgaagctcttgccttttgccgtgatcgcggtcttgaattttatgccgtgaaccgcgactatccggaggaggagaaagggcgtaacaatcattactcacgcaagctcaaagccgatctttttatagatgaccgcaacttgggaggccttcccgattggggtactatttatggaatgattcatgacggaaccactttttcggatttgatacgtaatgccggtgaatctcctgtttcggagaatcacggcagaggtcttttctcgcgcctgtttggcagatgattgaataataaatgaaaaaactgatatgaagactttaaagaaactattattgtttgttgtggcatccgccttgttggcaggctgcacctcctataaaaatgtaccttacatgcagaatcccgaggtcgtgaacagttacagggaagatcttcccctttatgatgcaaagattatgccgaaagatttgctgagtataactgtgaacacgagtgatcctcaggctgccgctccttttaatctgacggtacagactcctctgaatgcagccctgaccaatattaatactaccacacaacccactctccagcaatacctggtaaataacaagggtgagatagatttccccgttatcggtcgtctgaaggtaggcggccttacgaaaaacgaggcggaagatttgatccgtgagcaattgcagccctatctgaaagagagtcctatcgttacagtccgtatggcaaattacaaaatttcggtattgggagaggtgaaccgtccgggtacttttaccgtaggaaatgaaaaggtaaatatccttgaagcccttgccatggcgggagatatgactgtttatggcgtccgtgacaatgtgaaactgattcgtgaagatgcaaaaggcaagcgtgagattatcaatttgaatcttaataatgcagagctggttgtatctccctattactacctgcgccagaacgatatcatctatgtaacgcccaataagacaaaagccaagaactcggacattggcagcagcaccagcatatggatcagtgctacatccattttggtatctcttgcaagccttctggcaaccatcttgaaataaaactcataaatataattgttgattacaaactgttgatatgactgacgaacagaagaacaccccttcgggtaccgagcaacgtgaggagaacgttgatctttatgccttgttttttaaatactttgcctattggccgtggtttgtagccagtgtgctggtttgtattatatctgctttcatctatctccgttatcaagctcctgtctataatgttgatgcggccgtactcatcaaagaaggtgacaagaaaggtggaagcagcaataatcctatgggagcccttcaggatctgggtatgttctccatgactaacaattttgacaatgaggtggaaatcctgaagtcaagaaccttgattaaaaaggtggtgaatcatttgaatttgtatatttcagtggctgaggaacgtatgttcggctataacactcctttatataagtccactccggtaaaagtttatatgactcctgaagaggcagacaatctggaagaaggagccaagcttcatctaaaatacaccatgaatggaaaattggatgtaaaagtggaatatatgtttgacgaggagaagcaggagactgaggtaagttttgacagtattccggctgttttccccactccagtaggagttttcagttttacaaagaacgactcggtcccacctttggaagaagatatgaatctggtggcatacgttaattctcctacagatgtgacggaaagttatgtagagaatttgtcagtggaacccacttcgaagactaccacaattgctgccatcagcttgcagaatacggtaaagcagcgcggtatcgattttatcaattgtttggttgacttttataatctggacgcgaatgacgagaagaatgaagtggctcaaaaatccgcagagtttatagacgaacgtattggcattatcaatcgggagttaggtactgccgaaacggaacttgccgatttcaagcaacgctccggattgaccgatttgaccagcgatgcccgtctggctttggaggagagttcgaaatatgaacagcagctgaccgagaatgccacccagttgagactggtggagtccttgcgtaactacgtgaacaacccgaagaatgcaaacgaggtgattcccgctaatgtagggttgcaggatcagaatttgggttctatcatcaaccaatataacacgatgctgatcgaacgcaagcgtttgcttcgtacctcttccgaaaacaatcctgcggtaatcaatatcaatacgggcatcgagtccatgcggcacaatgtgcagactaccgtgaacagtgtactgagagggttgcagatagcgcagtccaaccttgaacgtcaggcacggaagtttgaaggcaggatcagcagtgcgccgcagcaggagaaagaatttcttactatctcccgccagcaggaaatcaaggcgaccctttacattatgttgcttcagaagcgtgaggaaaacgcaataaccttggcatctactgctaataacggacgtatcattaaagctgctcttcctagtaaaaagccggtttctcctaagaagaagatagttctgctggctgcctttgtattgggtatgggtattcctgtaggtcttatttatttgaaggatttattaaaatataagatagagaatgtcgaggatgtggagaagataacggatgttcctattttgggtgagcttcctttaagtaagaaacccgaaaaaggttccattgtggttcaggagaatcagaacggtatgatggaggaggcttttcgtggtctgcgtaccaatatgttgttcatgcttggtgccagtcagaaagtggtgctttttacatccacacagccgggtgaaggtaaatcttttattgctggcaatacggcagtcagtctggcctatatgggtaagaaagttgttattgtgggtttggatatccgcaagcctgggctgaacaaggtttttaatctgtcccatcgcacggaaggtattaccaattatttggctgatcccgagcataccaatctttttgatatgatacaacattcggatgtaagtcctaatcttgatattcttccgggtggtcctattcctcccaatcctacagagttgatggcgcgtacggtgctggaagatgcaatagagaaattgaaagagcgttacgattacattattcttgatacggctcctattgctattgtgaccgatactgctattgccagtcgtgtggctgatatgtgcgtgtatgtgtgtcgtgcagatgtaactccgaagttggggtatcagtatattaatgtgctgcgggatcagaagaaattcgataaattggctacagttattaatagcattgatttgaattcaagaaagagtggctatgggtatggtcataaatatggttatggatatggacacaagtatgggtatggttatggttatgaaataggagataaaaagtctaaatgatttacactgcgcagattaaattcctacaatttgcaggggggatttaaaatgtgccaagaatgaacaccttggctagaaaatattttccttttgtgctaattcctaattttttatattatgataaatttattgctgaaatgaagagaaaacttactctatcatttaaacagaaagccatagttacaaatgttgtatggtctttaggaggtaaaatagtgaacatggttagtgccttatttgtggggattcttgtagctcgttatttgggtccagaaaattatggtattatgaattatgttatcagctatgtgtctatatttacaatagtagctacatttggaatgagtaatattgaaataagagaactttcgcgtaacaaagaaaaaaaaaattcgattcttggcacttgttttataattcgtgtatgtttttctttaatagcttatttaggagtagtattatctttatttgtttttcagatagatagatttacaacgataatgattttggtttatggacttacactcttcactggaatatcggaactgtcgagaaattattttatatctatagttgagaataaatatattgtcaaatctgagatatttagaaccctggttggtgcgatagtaaaaatcggattattgtttcttaaagcacccctagagtattttattatagctcaggtttttgatacatttttggtagcaagtggctattattatagctataaagttatagtgggctcagtaagaaattggacatttgataagacaatagtacctttttttattaaagaatcatttcctttacttttatccggtgctgcaatagtaatttatcagcgtatagatcaagttatgataggtaatatgttgaataaaacagaagttgggtattttgcaacggctggaaaatttgttgatttgattttatttcttcctgctattttagtgcagactataactcctatacttgtacgggaaaaagaatgtgattcttatagctatgaagcaaagaaacatacttttgtaggtataactacatgggtatcactgctaatggcacttgccatttcactatctgcttattggatgataatttatacctatggtgaaaaatatgcattggctatacctgtattgcaaattatggcatttaaagctgtaggtatggcattgtctgctgctggagggcagattattattatagagcatattcagaaatgggcttttatacggaatgttttgggatgttttttgtgtgtgatattaaattatctgttcattccaaagtatggaattattggttctgcaattgttactgttatcactgtcttcttcacaggatgtatctcaaatatatttattccatcatatcataaaattctaaaacttcaaatttatgcaatgttttgggggtggaaggatatggtttattttaaacaaattataagacgctgaataccatgattaaaactctaaaacttttaattagaaaaagccttgagaaatattaccttagaaaaatatttatgttagaggcttatcatttttttaagttgctagttaagtataacgcttctatcaatacagatagagatatagcgaagatgcaatatactctgttgcgtgagaatcatactattgaaaaaggactttctatgagaaatccccgaaagggatttgggcaaaaaaaagtgttaaatctattaataaggcttgataaatatgtaacattgtattacaataaggataaggagtttgtcgactatttgctgtcaacaatacattattatataacatatacaaaacaaacaggagttgatatatcagatattgaattgaagtttaatactttacttaataggttggataatcatacatataaaaacatagtttcaggtataaaacctgaaacaaaggaacatattctttctgaatgtaataaaaattttgaatcattactatatagccgacattcgctacgatattttgaaaatacacttcttacaaaagaagttcttgagaaggcactttcattggctcaacaaaccccatcagcttgcaatcgtcaaggttggaaaacgcatatttttcaaggtgaaaatagtcataagctgattgaatggcaagggggatgtcatggttttgaggatcaagttaatacatctatacttgtcactacagatttaagagcctttcttttttatgaggttcatcaagcatatgttgacggaggtctatatgcaatgaatttaattaatgctcttcattcgctaggtattggtacaattccattgtcggttgcatttggatatgataaattagataatttgtctcaatttgatatacctcgaaatgaaattccgattgtgataataggtgcaggttatatattggataattttaatgtagcagtttcaagtagaaaaagtattaatagaactaataaatatcattaaatatgaaatattatttaccaattcatataaacgggggaaataggggttgcgaagctataacaaaagctactatggatattttgggatgtactaaggaacaattggttgtctatagtagtaatatagaaattgacaggtctttaggattggaacaaagagtaactttagtagcacgaaaacagttttcttttctatttaaggtaattagaaaaatcagaaatgtttttgttaaagaacaatatagtagaaatctcttcacatataactatttatccttaattccgcaacactattacaaatataactttttaagtacctgagcaacaaaaagttgctcaggaatttgccatgtcagatttttcacctatcttagtgttgcaaatcaaaatatgtatcaaacccgacagacatggcaaaggtagcaattaaatccgagaaactcactccttttggaggaatattttcaataatggagcaatttgactccagactctcatctgtaatcgactcaaccctcggtatgagatgcaggctgtatggttatcaatacagcgaaatcatccgttcgcttatgagcgtttatttttgtggcggctcatgcatcgaggatgtcaccactcatctgatgtaccacctttcgcttcatccgacacttcgcacatgcagtgccgacacgattcttagagccataaaggaactgacccaggataacatttcctacacatccgacactggcaagacctacgacttcaacacggcagacaagctgaatacactgctcctcaattgcctattgtccacagggcagctgaaagagggcgaggggtatgacgttgacttcgaccaccagttcatagaggctgagaagtttgatgcgaagcctacatacaagaagttccttggttatcgccctggcgtggcggttattggcaacttgattgtcggcattgagaacagcgacggcaacacaaatgtccgtttccaccagaaggacacgctgaagaggttctttgaaaggtttgaacaaaacaagcttattatcaaccgtttcagagctgattgcggctcgtgttctgaagagatagtggaagagattgctaaacactgcaagaccttctatatccgtgctaaccgatgcagttcgctctacaatgacatctttgccctcagaggttggaagaaagtggaattgggcggcattgagtttgagctggcctccattctcatcgagaaatggaaagggaaggcataccgtcttgtgattcaaagacagaagcggatagacggcgaactcgacctgtgggaaggagaatacacctaccgctgcatccttacaaatgactacgagtcttccgagaaagagattgtcgaattctataacctccgtggagggaaggaacgcatcttcgatgatatgaataacggattcggctggaacaggcttccaaaatcctttatgggagaaaacacggtgtttcttctgcttatggcactcatacgcaacttctataaattcatcatggcgaggcttgacgtgaagaggttcggactcaaagcaacaagccgcatcaagacgtttgtctttaagttcatctctgtgccagccaaatgggtcaggacatcaaggaagtatgtgctgaatatctattcatgcaacaatgcttatgccaatgtgttccagaatgactttggataacaccgacaacttatagtcgtgattttgcgtattgcctcaagtcgcatggtggggtaaggggcatttatatgtctttatggtgacattcgatgcactgtgccccctttttactaacgatgcagattcttttcgcttctgtatcatattaggcgcgtagttgcggatttgaggtttatataacccttttttacggaagattaccaaacatgatattatgttgtccactggaggggatatgatgtgttatgcagataatgaagtgatttatacaaatgagtatctttatgatcgacgaatacgaactgttctttgggggtgttcaattggagaggaaaaccttacatttcgcaaacttgaaactttgaagcatttttctgctatatacgcaagagaatcgcttacaaaagaattactactgaaaaagggattgaaaaatatctttttatttccggaccctgcctttattcttaaagcagaagcctgtaagttaccgtcttgttttgcatctggcaaagttgtaggtattaatattagtaattttgtttcttctgaagatggatttaatactttgtttggaaagaatctaataaaattaatagattatattattgaaaatacatcttatcatattctactcgtgccacatgtgttttggggggcacaggatgaccggattatttgtaatttggtaaaggatagatatataagtaagaaacggatttctttattagatgctgattgtttgaattattgtcaattacgctacgtaatttctaactgtacaatatttatgggagcaagaactcatgctgttatttctgcttacagtacttgtgtacccaccgttgctattggatatagcattaaaagtagaggtattgctaaagatttgcaacttcctgaaactactcttgttgatggtgttcatctcattaatgatcagcaacttttaaatgcttttcaatatgtgaatgaccataaattagagatacgcaaacatttagaaaatattatttccgaatatacttctcaggtttgggaagctaaaaaaatgttggatagtttatgatctagtattttgaagtttgtggattgatagaatagagtgagtataaatttaatagtgtctttaaagtatggtatcgtcttctgttagtgaatttctatcaaaatattttgtatgtaactattttttattaatgacggtggatgtgcttcttgtatggtgtggtttagctgtaattgcaaagtttgaactaataatcttattgagcgctattatcattagtcttaataaattgcggaatcaaacaacaagaatggacttgtttattatatttttttctatttctatcgctattgctagtctttccaatatttatccacaggctttttggtttgaaggtgttaggtatcagctgttttctattattttcttttttgtaggtgaaagtagcacttcaaaagattgggatttttttgacaaatccataatccctgtacttgtggtatgtttcattggattaatattatatattacgtctccaagctggtacgtggattttaaactttctggatttacagataatgaaggaggtcgttttttggaaatgacacgtttatctgcattttggacttatccatattgggttagttatggaagtggtattatttatttctatttgttgtttaaatcttataaggaaggacggataacaactaaaattgcattcgctttgatttttttggctgttattatggtgttagcacagcaacgtgcccctattgcttttgtggcattaataactttggctttgttagtgaatagtcttttcaatgggcagaaacgatcttttagtacatacgtactttttttattactcatcttggtttgctgcattagtattgtattttcttttttagatcaagaacgtttgatatttatgctttctaaatttgagagcttaatagaaggtggaaatgcttcatttttaaaggaaagaacaaatatttttagtgatttctattctaagaaaattactttttggggagatggcatcggtcgttatggacatgaagcatattatagtggaaagatggcaataactgaccagcaatatttgaagataatgtatgaaacaggatattttgggataatatgttattctatttttatactcttggttgtcattcgtggaataaggaactttaaagataacctatttgaattaggcattatattcttttacttaatggctatgaccggagctaattgtttgtcagttacaggccagcattgcatcgttttttggttttgttgtggccgtatctttaataaatcatgtttaacgtataagtgtacaagctgctattccttgcaaaaagattaaagtgctttaatggtgaaaatttagttatattatgaataaaagattgattgctatccatcttccacaattctatccatttcaagaaaatgatgaatggtggggcaaaggttttacagaatggactaatgtaacaaaagcaagacctcgttttccaggacattatcagccacatttaccttctgacactggattttatgatttgcgtttgcctgaagcacgggaaatgcaggcagctatggccaaagaatatggtatttatggtttttgttattatcactattggtttaatggtaaacgactgatggaaaggcctgtggatgaaattatttcaagcgggaaaccggattttccattcatgatatgttgggcaaatgaaaattgggcaagaaactgggatggtggttttaaacatctcttaatggagcaacaatatacggatgaggatgatgcagctcacatggattttttatgttctcatatattttcagatagaagatatatacgggttaatggtaagcctttttttgcgatttataaagcccatttattgcccaatgcggaaaagactattaaaatttggcgcgaggtagctcagaagcatcagatggaattgtatttagctctttttgaacacactggctataatattccggaatatttatccaagggttttgatatgtccattaattttcagcctttctgcatgggtaagtttcagcattgtaaaatgttattcaatataacattaagcaagcttttaaatagaaaaatcacgatgctgcattcatacaagaaatatgtaaagtatcgtattaaaactcctttgccttcttatcggcaatttccttgtgttacaccaaattttgacaatgcttctcgacgtatgcataagggattcactgcttttataggaagtactcctcaattatatggaaaatggcttagcagtgtctttgaaaaattcaagccttatagtcaggaagaaaattttatttttataaatgcttggaatgaatgggcggaaggaaaccatttggaaccagaccaaaaatggggaagaaaatatttagaagaaactaaaaaaaatatagaccaatataaaaaacgatgatatgaaagaaaacaaagcaagggtcatagcattttatcttccccaatatcatcctattcctgagaatgataaatattggggaaaaggatttacagagtggacaaatgtagctaaagcaaaaccattattccgtggacactatcaaccacatataccagcggatttaggcttttatgatttaaggcttcctgaagtaagagaagctcaagcagaactggctcgtgatgcaggcatagaaggattttgttattatcattattggtttggaaatggaaaaatgcttttgcaaaaaccatttgaagaagttttgcgattaggcaaaccagattttccattttgtttgtgttgggctaatcatgattggacaactaaaacttgggtgaaaggctcttctatggtgaataatacaatgattgcccaacaagaatatcttggtgaacaagatgatataaagcattttgagtattgtttgcgagcatttaaggatcaccgttatatcactattgaaggtaagccgattttccttatttatgatccgttaagttttcctaatgttaaggagtttatgaataggtggaattttctagcgaagaagaataatttgaaaggtatttattttattggagttactacagggaggcagtcttcttataaaattgtcacaaatttaggattcgatggtgtttgtcataataggcgttgggaggctgaagctaaagctgcaggttttcgttttgttcgtcgtatgcagtcattattgggatggcatttgggtatctctttgatgaaatacgattacaataaggttgtaagaaattatgatacaccagaaaataagttggaaaactgttatccggttattactccaggatttgatagaacaccacgtgcaggaagacgtgctggtatatatgtaaattcatctcctaaaaattttaagaagcatgtagccgaagtatgtaaatctattcaagataaagatgatgatcatcgtttggtatttcttagtgcatggaatgaatggggggaagggaattatatggaaccggatttaaaatggggacatggttatttagaagcgttaaaatctgtcgtaaaatttcaaatcaaataaagtggatttgtttttataagcttctgatttttactgataatattaagtcaaatgcagaagttatatagtatctattaaaatagctattataattaatgtttgaaaaaatcaaataaaaacatacctaattatgggacatgattattatacagatgataaaggaactttggtgcttatggctcttcttaaagagtatgggatcaagaaggtggtagcctcaccgggtacagggaatatggctttagtggttagtatgcaacacgatccttattttgaaatgtattcatgtgttgatgaaaggtctgctgcttatatggcttgtggcatagctgcagaatctggagagcccattgtggtaacttgtacggaggctactgcgtcaagaaattatctgcctgggctaaccgaggctttctatcgcaaattacctatattggctattatgacaggacgtggtgagaatcgtacggggagctatgaaccgcaatccattgacaatgcggtattacccaatgatgtggcaaaatacagggtgaatattcctgtatgtagaaatcataaagatgaaagaatagtcacaaccaaactgaatgaggctatcaataatttatatacaggcggtggtggtccggtatgtgtagttatggaatcgtatgacagtcttggattcttggtgaaggaattgcctaaagtaagggtaatcaaaacatataagaagaaagaagaacttccacctttaccacagggcaatatcgctattttggttggggctcatcagaaatggaatgctaagactgtaaaagcagttgaacttttttgtgagaagaacaacgctgttgtgctttgtgatttgaccagtaattacacaggcaaatatcgtgtcaattattctattgttgcaacccaagaaggatgttcgaagttgcttccggacattgctttgttaatctatattggtactgtttgcggtgattattatacatctgaggctatgtgttgtgctaaagagtggtggatggtcaatgaagatggtatttatcatgatagattctacaagctaacagcgatgatttcaatggaagaggtagatttttttgagaactattctattggcgaatataaggaaacaagtctgtatgaagaactaaagaaacagtgtagtacgatgattgatgctattcctgatttgccattctcaaatctatggattgctcagactgcgtataagcatattccggaaaacagtgtgatacatgcggccatcaataattcgttcagatcatggaattattttcctttgccttccagcgtaactggaagttgtaatgtaggaggatttggcatcgatggaggtttgtccacattagttggagcctcattggtgcatcctgacagactatactttggtattattggtgatcttgcattcttttatgacatgaatgccttgggcaatcggcatataagaaataatctccggttgctgttagttaacaatggcaaggggcaggaattccgcaattatcaacatccggcttcgttgttggatgatgattgtgataagtatgtggctgcaggagggcattacggaaagcaatcacccactcttgtaaagtattatgcagagagtatgggctttagatatcttacagcatccagtaaaaaagagttttttaaattgtataaggacttctttaatgataaacatgctgacaaaccaatggtgtttgaagtgtttacagataatgtgcatgagaatgaagcattacatacgattcgatatatggtgaagccaaaaatatctcctgggcgtttagcgaaacaaattatagccaaaggtatagtgggagagactggaattcaagttattaaaaccataaaggataatatgggataaaaaatatgaaacttatagtttcgctttgctttgtataggtagatatttattgataaataaatacaaagtgatatttctggatataatttgggaaaaacagtatactatgaaaatttgtattatcacttgtcatgatgtatataatttcggtgcatcattgcaagcctatgctttacagcattatctggaagaattgggccatgaggtggagattattgattatcgtcccggctatttatataaaaaatatgattggaaatcatttacaagtaaaaagtttgataagcttaatagtttctttgtaacaaggtggatgtttcgtatagctaaatggtcttatttaagattttcgctaggacgcaaaaaatgttttgacgaattcacaaagaattatttgaagttgaccgataagacctattacacttttgaagaattaaagatgaatcctccttgtgctgatatcattatagccggaagtgaccaaatatggaatcctttatttcctaatggtaaagatcccagttattacattgattttgctttatcacaaacaaaacgcgtgtcgtatgctgctagtttttctgtagaatacatttctgatgcagataaagaatttgtaaaaggaatgttagctaaaatgaatcgtatttcagtaagagaatatcaaggagtggatatcctgaagtcgttagatattaaaaatggagtaaaagtattagatccggtctttcttcttgatagaaattattgggaaacatttatgcataaaggatcagaaaaggattatatcttaatttatgactttgagggaagtgatttgatgaagcgtgtcgctttatattttaaaaggaaaaaaggttggaagatttattctattaatgacgcattgcctcgattatatgcggataagaattttactaaggtaggaccacaggattttctttccttaatttataattgtagtatgttcttgtctaattcgtttcatggaactgcttttgctgtttattttaataaacctttttatgtatttgggctaaaaggtattagtttaaattcaagaatggagagcctgctacgttctgtagatttaaaggatcgctttattacagaaaatattgatatagaaaaacttcatttaaattatgactttaataaggtgaatttattaatagaggaagagaaaaactattctaagcaattcttggattctgtcttgaaaactaactaaaaagatcgtttgtatgactcttttatcaatctgtattccttgttatggacgagtggaatacgttaggaaaactttgaaaagtatttttatagataatgctgatgttccattagaaaagtatgaagttattatatcagataatgattctaatcaggcaattaaagtgttgacagaagaatttaagtatcctaatctgagatatttttataccaattgcgaaggattcatgaattcttactatgtgttgacttatgcacaaggagaattttttaaactgcataacagccaaactttatttagaaaagggagtttaagtaaaattatttccgagataaagaataatatagaaaataagactttaattttttatacaaatggattattgggaagtcgtaaaagtcaaacctattctaattttaatgattttatgtacaacctctcatattggtcttcatggagtaatgggtttaatatatggaaatcagaatttgataaaatagacaaaaatctgaagttaaataaattgtttcctcacacttccttgtttcttactcagcatcaggcaaaattattttgtataaatgataacctattatttgatgtacaaagaatacctaaacgagggggacataataaatttgaggcatttacaattgaatatccttcgttgctggatgaatgttgtaagaaagggcatatttcaacgaaatgtaaaaaacacatattatttggaattatggtacagtttcttccgtctttactttttaataaatatattattcgaatagaaacatttgatgatacgggctttagaaacaacttgaagaaatattatccttcttatgcttattggcttgttttaatttctgttttaggtgttccttttagattgttctgtcgaaaattaaaaaataaaagatgaaagctaagatattctgtctgttttttcttatagtattagaatttatagtatgtccgcagaacggttggacacaagacaatactattcctatgattggtgcctactattttgacggttggtccggaaaaaataattctcaagaactatgggcacaagaagcccctactcatctgacagagaaactatataatgattataacgaacgtcaaccaatttgggggtggagaaatgatgatttagctataatggaacgtcaaatagatattgcttcccaaaatggcattacttttttcctgttttgctggtattggaaaaaagataagggggagatggatattaaaagtatagaaaatcatgcatcgcatactagtttaaagctctttatgaaagctcgcaataagcataaaatgaaattcgctttattaatagccaatcaccagggagctcggatagaaggggaggataattggttgaaagcaatggattatatggcggaaatatattttcaagatagtcaatatcttaaagttgaaaataagcctgtggtagcattctttaatgccaaagcagctgctccatcgcttaccaaaatgaatgactatttaaaagctaaaaattacgcaggactgttttcaatatcctgtaatgataaaagtaagaaatacagtgcaaattcatggtataatattcgtgaacatgagccgggatatgcttatagaaaagagtatgagatcttagcgaagaatgcggaagtaagttggtacacttatcctaaagagtacaatattattccattggtaatggcaggatgggatcagaggccatgggagaaacaagaaaaatctctttattatgtgaacaggacacctcaactctttaaacaacatcttaaaaatgcggtgcaatttgtgaatgaaagaagttgtaaacctaaaatgatattgatatatgcatggaatgaatatggcgagggcggatatatagcacctactgtaggagacccgaaaggaaagtatttaaaaatgattaaagaagtaattcgttagattatgaaaatagcatttatcagcacccgtggtatcccaaataactatggaggttttgaacagtttgccgaatatatttcagtggggttggctgcacgtgggcatgaggttgtggtatattcacctcatttccatccttataaaaaagacacttataaaggagtacgtataaagcacatctatagtcccgaaacttggatgggcagttcggtagggagtttcttttatgattttgcgtcattgaaagatgcattgaaaaaagagcatttcgatatcatttacgaagccggctatacaagtattgtacctgcttatatttggttcaatgtgaagaagatcaaatatcccatatttacgactaatatggatggcttggaatataagcgtactaaattcaacaaatgggtacagaaattcattttttgggaagaacgtactaccgtgaaacatagtcattatttgattgccgataacatgggaattcatgattattataaagagaagtataataaagaaagtaagttcttggcttatggagcagatatccatgaggattatgacatatcattattggttgagtttggtttgcaaccacgcaaatattatttattagtggcacgcttggaacctgaaaataatattgaaatggctatacaaggctttttagcatctggcgaaacggacaaaaaggaacttattatagttggaaaaacgaatactcctcatggcaagtatttggtaggaaagtatacaggccaaccaggtattcgttttgtaggggggatttatgattttaaaaagttgaattcagtcagatactattcgtttgcttattttcatggacatagtgtgggtggtacgaatccttctttgctggaggcaatggcgtcaagttgttatatattggcacatgataatatctttaacagggcggttttgaaagataacgcacactattatgcttcttctcaagccgtaactaaactactgaattctatctatgaattaaatgaatcttgtcgtaataagtttattgaaaacaatttgcaagaaattcggaacgaatactcatgggaaagtttgatagataaacacgaaaaatatttttattggttactttctcagaaacaataaattgctacctttgttcatgatatcatcatgaataattaggttttggcaaaaaaagagtatagacaactttccgcacaagaggaaacggcattcatcctaatggtgttgttggatgaaggcaaaagcaatttgccttatagattgttgcattgtttgacaagtgtacattttgccaatcaatattatttaaaaagactgttctccggataccgttctttaaactataatttttatcgtgataaatttgaaaaggaacaaggttgattgttgtttttcctgccttttgttttaatgaagaaaattttatttgtttttctgctgtgtatgatatggcaggaaggtttttctcagtatgtgtatggaaccaccggacttctgcacatgcctactgccgatatgcaacgggataagacattcctgttcggagcttcttatttggatgtggctgctactcctgcccattggaattatcatacgtttaattactacattaatatcaccatttttccttggctcgaaatcggatatacttgtaccttgcataaggcagaacacggtagtacttattttccaccttccgtttgggggaaatattgtaaccaggaccgacagttttcagggcggttgcgtatatggaaggaagggtggtggaaagaatggactcctcagattgtattgggcgcgaatgatccaagtaccaatgatatattaggaaattctgataaagatgattatggcattggtggagtaggagagatgggtaatggacattggaaccgatattatatagctggtactaagcatttttatttcaaaaataggggagagctaggcattcatgttgcttatttatacaataaacggaaagactatcatttaaacggtccggctgttggagtaaattttcatttttatctatcgggtacaaatttctttgtgaaggcattaaacaatcttaatgtaatggctgaatacgacagtcgtaccataaactgtgggttaaaatatagtttttggaaagattatattaatgctgtggtagaaatgacagaatgtaagtatttgtcaggcggagtgatatttaaagtacatttaaaataacaaacactataacttattcgtatgaaaggaattgttctcgctggtggtagcggtacccgtctgtaccccatcaccaagggagtaagcaagcagcttctccccatctttgacaaaccgatgatttactaccctatttcagtcttgatgctggcaggcatccgtgagattctgattatatccactccctatgatctgcccggctttaagcgtcttttgggcgatggatcagactatggtgtgaagttcgagtatgcagaacaaccttctcccgatggtcttgcacaagcctttattatcggagagaaattcattggtaatgattctgcatgtttggtattaggcgacaatatcttccatggtaacggtttcagttctcttcttcgtgaagccgtgcgtatggcggaagaagaacaaaaagctactgtattcggttactgggtgaacgatccggaacgttatggtgtggcagaatttgatgtggaaggtaactgcctgagcatcgaagaaaaaccggaacagcccaaatcaaattatgcagtggtgggcctctatttttatcccaacaaagtagtggaagtggccaagaacatcaaaccttccgcacgtggcgaactggaaataacgacagtgaaccagcgttttctggaagatcgtgaactgaaagtacagacgttgggacgcggttttgcctggctggatacgggaacgcatgattcattggcagaagcttcgacttatatagaagtcattgaaaaacgtcagggtttgaaagtggcttgtctggaaggaattgcttatcgcaaaggctggataacggcagataagatgcgtgaccttgccaaaccgatgctgaaaaaccaatacggtcagtatctgctcaaagtgattgatgaagtggaacgtacaggcaaagaaaatctagattaagatatggaggttataaaaacaggaatagaaggtgtggtggtcattgaaccgcgcatctttaaagatgaaagaggctatttctttgaatctttttctcaacgggagtttaatgaaaaggtgatgcctgtcaattttgtacaggataatgagagtatgtcatcgtatggcgtgatgcgtgggttgcattttcagcaaatgccttatactcagagcaagctggtgcgttgtgtaaaaggtgccgtacttgatgtggcggtagacatccgcaagggaagtcctacatacgggcagcatgttgcggtggaattgacggaggagaaccatctccaattctttatcccccgtggatttgcccatggttttgccgtattgagtgaaatagcggtttttcaatataagtgcgataacttctatgcaccgcaagctgatggtggcattcagctgcgcgatgaaagtctgggtattgattggaaaatacccgttgccgaggccattttaagtgagaaggatttgaaacatcctttgttgaaagactatgactctccgtttgactacactattaatctatacgaatgatgaatatacttgttacaggtgccaatggtcaacttggcaatgagatgcgcagggtgtcgttagacagccggaatcgttatctctttacagatgtaaatgaactggatatcacagatgcgacagctgtctgtaatatgttgaaaaaggagcagatagatgtgattgtaaattgtgctgcttatacgaatgtagacagggcggaagatgattttgctatggccgatttgctgaataacaaagctgtggagaatttggctgttgctgccgcagaaacaggtgccacgcttattcatgtatctacagactatgtgttccaaggggataaaaacattccttgccgtgagtcttgggaaactgatccgttgggtgtctatggaaaaaccaaactggcgggcgaacagtctttggtaaaagcaggatgtaaatatcttattttccgcacagcttggctttactcgcctttcggtaagaacttcgtgaaaaccatgcggcaattgacttcaacaaaagattcactgaaagtggtttttgatcaagtaggcactcctacttatgccggagatttggctgctttgatctataacataatcgaagagaacttgctgaatcgtcaaggtgtctatcatttcagcaatgaaggggtatgttcttggtatgattttgcgaaggaaatttgtgaattgagcggaaataattgtgacatacagccttgtcacagcgatgagttccccagtaaggtggaacgtcctcatttttcggtgctggataaaacaaaagtgaaggaaacttttggtatcactatcccttattggaaagattctctaaagaaatgtatgctagaattggaaactcaacaataactaattaaaacaatattttaaattatggattcatttaaacgcaatataatcattaccggtggtgccggttttatcggcagccatgtggtacgtctttttgtaaacaagtatccggaataccgcattataaacttggataaactgacttatgccggtaatctggccaatttgaaggatatagaggacaaaccgaactatatttttgtaaaggcggatatttgtgattttggaaccgttcaggaattattggtgcgatatcaagtggatggtattatccatcttgccgccgagagtcatgtggacagaagtatcaaagatccgtttacttttgcacaaaccaatgtgatgggtacattggctttgcttcaggcagccaagttgtattgggaatccctgccggaaaagtatgaggggaaacgtttttatcatatttctaccgatgaagtatatggggcattggaatttgacgggactttcttcacggaggaaaccaaatatcagcctcatagtccgtattctgcaagtaaggcaagtagtgatcactttgttcgtgcttttcatgacacatatggtatgcctaccgttgtaacaaactgttctaacaattatggtccttatcagtttccggaaaaattgattccgctttttatcaacaatatacgtcatggaaaaccattgccggtatatggtaggggagagaacgtacgcgactggttgtatgttgtggatcatgcccgtgctattgatcttatttttcatcagggcagaacagcggatacatataatatcggtggtttcaatgaatggaagaatatagatttgataaaagtaataatcaaaaccgtggatcgtttgttgggaaatccggaaggcacttcagagtgtctgataacttatgtgaccgaccgcaaaggtcatgatctccgctatgcgattgacagcaataaactgaagcacgaattaggatgggagcctagtttgcaatttgaagaaggaatagagagaacggtccgttggtatttggacaatcaggaatggatggatcatattaccagtggcgaatatgaaaaatattatgagtcgatgtataagaacagataatgagaatcccagttggggataatacggcatacatctttaaacttaccccccataccactatgaaagacaaattagcatcctacaaccacttgatcgagacctttgtgattgtcaccgagacctttctttgcggtctgctattcctgcttttcagcaagctgtccaatgagatgcagtgggatagcctgcaggttggtggaaccaccgttctgcaagtcatgcttacactgatgttatgttacgccctttgcgccatccattcaggagtagtgcttcaccggaggaaagtgcattcccttcagatatggaaacgtgtgctcgagaatatgttcctgtttgtcctcctgggcggtctggtcctttctgtaggaaagtatgcggatatagcctccctgttcatgctggagtaccttttcctcctgtttctgtgtcttgtttcgttccgtttcactcttcgtcttctcatcaggctttaccgtatgagcaagaaacatacgcgttttgtagtactggtaggaagtacggacaacaacctggaaatctaccatgagatgtcgggcagtgaagatacaggttattcggtcgtgggctattttgacggtcaggcgaatcctgctttcccggtagaatgtccgtatttgggccagccggcgcaggtacaggaatatctggagaaacatgattatgtacattacctgttctgctgcctgccctcaaaagacagagaggtcattgtttctctgattgattactgcgagaaccatctggtacatttcttcagtgtgcccaatgtgcgcaattatctccaccaccgtatgtcgttcaacatcatggggaacgtcccttacctgggccttcgccccgatcccttaagttggccggggaaccacctgctgaaaagaacctttgacatagtagtctcatcggtgttcctttgtacgctttttccggttattctgattgtggtggcgatagtgaccggattgaccatgcccggcccgctgttcttccgccagaaacggaacgggctgaacggcagggagttttattgttacaagttccgcagtatgaaagtaaatgcagatgccgacaggatacaggccacagagcatgatccccgcaagacgcgctggggcaatataatgcgtaagacgaatatagatgagctgccccagtttatcaatgtgctgttaggagatatgagtatcgtggggcctcgtcctcacatgcttctccatacgcaggaatattcaaggttgatcaataaatatatggtgcggcattttgtgaaaccgggtataacggggtggagccaggttacgggtttccgtggggaaacgaaggaactaaaagacatggagggccgtatccgtggtgatatctggtatttggagcactggagcttcggtctggacctttacatcatgtacaggacggtggcgaatgtcttccgtggcgagaagaatgcctattagtaaaacgggctgttcttaacgatccttctcgatgagggtccttagtaatttagcagttaaaaaactttgtttttgcagcctgttatttccgtctgccggccggaaatggaacatagccggcactaatgttagatcagaacccttgtcctttgtgaaaagtgcagggggagctccgggaacgagagcgcttgttcccggagctttaataataaagaagattatccgattaggatttattcagctttaaaaataaacgcagattatataataacccgtaacaggaaggattttttattttctgatattactatatttactcctaaagaatttttatctatatgatagtctgtttcggtgtgtcggtaccgaccggatgatcttagtaaagaacttccctctgccagtagtatcactctctacttgagagcagaaacgaacactggcaaaaggaaaccttgggaaaagaaattacctttccaaatatccgaacaccccttccgcgtcaaaacacggacaagccttcgggatgcttccgctcatatccctatgtccccttatccgggcaccgggaaagagctttgccagacgcatcagcaacaagataagctgttctgtctgctctgcggtccgggtgtctgccggatgtccgtctgcatccagaccgccctcgtagcagatgccgatgctgcaacggttccagggacggcagtgtgcccccacttccagcagtttgcggtgctgggtgatggtgccgtcgcgacggatatagaagtggtaacctacagtccggaaaccacgggtcttatggtcacgaagtaattgctcggcagtatagtctttgtcacaacgtgtggcgctacagtggaggatgaggtatcgcactgattcgcgtccttgcatcagcgctccgtcctctacggtgaggagttggcgttcgttcttcatttcttcctcaccgattatcattgggaatgtttcttgtatcataataaattgagatttggaaaatgttgtgtttgttctttagatgagggatgcgcaactggtaatgcccaaagcggtgagtgccgcgatggctgcctggataactgcccggagaatttgtgtccaggtgattttcttggattcgtggttggatttattcatggaaatatctgttttttgtcagtttaaaatgcgaatggaacaaaaggaggttacggaactggcggacggacacgggggagtgaaagaagaatccgtgtcgcccgtgttccataatcacatcatgctatctctgtggagcggaacaagccggtcagctattctcgtctgccggttcaccggaagcggctggaatgcgggaggcgtcagcatcgtcagcggcaatgccggcggcagaagaattgcctgtcaggtctaccgtagtctttccggccttcaatgccttcactacttcggcggctgccttgcgtgtgggaaccagttggaattcggcatcttggcgcaggttgttgaaacggacgcccggagcccacagtacgttcacctcggtgatgttctccacagtgaactctgccatcgaatgggcgccgaggcttcggatactgttcgaaaatacgcccagatcgcccatctgtatctgctgtccgttcaacaactgctcgcgcaggcagtccacggcaagaataaggatggcctggatatcggcgcgcgaatatacacatccgtggctggcaatgtggtaacagaacttgtccagtgtcattacttgtgagtactgggcgttggcatacgccttcttggccgcgtctttgtcggtggggttaccacgcatgcaggtgctgtagttaatcatgataaatagggttttaagagatgaaaaataaaaaatgaatttcgtcagtgaagaaggagaatactttacttttcttgcggattgcacgtaggtaacgtgtaaggctgaaggttagtaacgtatggggttacatgttagtaacatgctaggccgaaggttagtaacgtatcggctccctcattgttgacattgcaaagataggtactgtgaaatgcgtgctgacgctttatgacaccttgtggcactttatggctttcatcctgttccaaagagcttgcagggctatccggggctgcccagatgccggttgatcagtgtcacctggcggctcgtgaagactttttgcgaggtatagtaacccgttgcggataactcttccatcagagggggacagccgtttatccacctcatcagatgccgggtggctatccggggatttgaaccgggaaaatagagcagagccaggctaccctttgtcatggatgggaaataaaggaaatctttcatatttatacattttaaattcaggaatcttgcaaacttgcagaacttgcactctctctcacacccacacacgtacgtgtgtgcatgcgcgcgttgaattcgtattcgccacgccccactttgaccagctgtccgcgttcggttatacgtttcagcagcgagtccaccgagcctgccggaactcctacctgttctcctttgtcgatggcttcgttgcgggtgaagcgcaggggaaggcagtcgaacagggtttcgggagtcatgttcgccgatggtgcgctgggggttcctgcgggcaggagcgagagaatgtggcatgcatggcggtacagaggttccaccaaggccagcacggcataaaagtcgtcggtgcggatggagaggttgaattgcggcacgattccgtctgctatgttttcttgtggaatatgggccgacggggtcagtccgggacagttcagcagggtacgcacgatgttttcctgtggttcgccgctcctttcgcctcccggcagcagggattccagagagcgcagcagggcgataatgcttatgatgcggaagatattgatggcaatacgggttacagcgcttttcatctggttaccgtgaatggcggaggctcgtccgaatacacgggcaaagtggaagttgaatatctctttttgctcgtgggtgagcttcatgttgatgttgctcaccgaggcggtgatggcgttcagcacttctttccattgtgccccccattccagaaaacgggagtcatagtctgtatccgcttcgttgaactggtcttcccattcttcaatggcaggcatatagtagaacagctggcgcgagaacaatccgttttcggccgatgggataaggggcttgatttgtgcaggcgtgccgctgagaagcacgcagaggaacgtgacgttacattcgcggtattcgtgattggtgcgccggttgtaggccagccggtcatggtcgaaacatttccggaggaggtcgctccagtgtccgtgatcgcctccaatggcggtgctcacggtgtcggcctcggtttcgcatatcagtcctacgcctccggagtccatcaggttttcctgtatgcctgtaccggtattgtcaccggctatgaggagcattttcagctggggctgttcgggttcaggggtatttaccttttccttccccaaagtgtcccatttggtcttttccatgcggtaggtctttattttttcccggtaggtgtccagcagcgcgttgtgtatgggttctgccagacggcgtacccaggtcagtgcacccttgccggaagcgggaggcgcggtgacgaacacttgcagacagggatacttgtgttttcgtccgtacacaaaacttaccagtttgttgagggtgcttcccagcacggttgctgcacccagcagcaggatatcccgttgggcgggagagttaccgcagtctatgatcccttgcaggaaggcgggccagcggtagtcggggaaagagggaagtcgggcagggaggatggctttgggcacgccgtcggacaggggggaggctgtgtccgtgaaaacagcgtcgggcggagtcccgtcggaggcatccggatgggcattataggatacgcgtgcacgtgtgtgggtgtggagagactgcaagttctgcaagtttgcaagtttcgggtccattttcaccccggccacctctgccagatggaagacggttcccagggaatttctgcctgttcctttggtcagagcatgtccgtacagtttgtctgcttcatcgtggtggtacttttcggatatgcggcagatgcggtggaaccgggtgcgtccttcttctccgcaactgttggctatggcaaaggccagcggcatatattcctgataggtgggggccacattgactcccgcttgttcgatggctgttaccagctgttccaagatagaaatagaatcgttcattttttaatatttatggttattgattttcgcttctccgtcgtgcgacagaaaacaggctctggacaagtcggcattggccctgtccactttcagctcgtatttccattccagatactcccatgcggtgtgcagggcattgtcgaaggattcttctacgctcaggaaagggtttatgcgataagggataaaaagttttactccctgatttccggggctgacaaaggaaagtacggggtgcagcacttcatcggcaaagagacggtcgcgccacattgccgcttcttcggtggaagccagttcgtcaatatctatgacaaagaggcccgaaggaacttgcatgcattgctctttgcagtaagagaagatacctgccggagtgacatacggtaaaagggtctgtttattctttcggaacgcttgcttgtctccgagtccggctctgactttacgcgtcagttcttccagttgcggattggtgctgatgtaggtatgaagccctgccacactgcatatacatgtgggtattttattggtgacgggtgcattgaaaaatgacatgatgtattctttcataaaagaaattgattttgatttatctgcacaaatatacgggtagggaatgacgtatggaaatcgattcataaccgtttactatctgtttactattggtgcatgctattgattatatattgatgaaatatggattttgattaacgatctgttgataataattaaagaatagagaaaagaaatagtatatgaatgaaaaacctgatatgatgataaatatttatggcggaaataatctgattgctcctgtggcatcttccgccattcagaacttttatggcgaccggggtgatgaggccgccgaccaaccggaagattctgagaaaacggagaatacagaaagtgtggcggatgagaagccggcacaggaaccggcggaactgtcggatgatgaattttacgtatcggtctatatacccgatataaaggtgatgagggcttacaagatacttttgggagagtgtaccacggcacgcgaactggcggtggtggtaggaaagatgctggccgatgagaactgtaggaatgtagacaaacacacggtggtgaaagcggctttcatcaagtcgttgctaccttttgccaaacggcttgtgtcgggcggtacgatagccaatatacgggcgcagattaataatatgctggctagtaaataattttttcagttatcctcttactccattggcacgttagcaaatcggcaaattatttatgttgcgggattatcagatagagatgaaaacacgtctgatggaagcgtggaaagctcaccggagtgtgatggtgcagatgcctaccggtacgggcaagacacatctgctggcatctgtggtcagtgagttcgtgtcttctgccggcagcggggtatggcttattgcccatcgtagggaactggtggcgcaaatggaggaaacgctggctaaatatggtatccggagggaggatactccggtcagggtgatgtctgtccaatggctgtcccggcactggaatgaggcgggtgatgctccgggactgattgtgatagacgaggctcatcatgccttggccgcttcttacacggagatgtggaagcgttatcctgccgcaaagaaactgggtgtgactgccacaccttgccgcctgaaccgtagggggttcacggaactgttcgaggtactggttacttcgtggagtattgccgagtttattgaaaaaggcgtgttgtctgtgttcgattatgtatccatccgtcccggcagcgaggagcagcggctcattgacggtctggagaaacggggggccgatggggattatcaggtgaaagagatggatgcggtactgaacaggcgtcccggtatcgagcgcctgtaccgcagtgtcaggcagtttgcttccggcaagaaggggatggtgtatgccatcagcattgaacatgcccggcggatagcggagtattacagcaggcggggagtgaatgcggtggctgtggacagcaagactcctgctatggagcgtaagcggatggtggaggagttcagacatggaaaaatcgaggtgctggtgaatgtggatgtattcagcgaggggttcgactgtcccgatgtggagtttgtacaactggcccgtcctactttgtcactggctaaatatttgcagcaggtaggacgcggattgcggagatcggagggcaaggaggcgtgtatgctgatagacaatgtggggctgtaccgcattttcgggcttcctacacagcgatggaactgggatgctatgttccggggacggatggcgggaaaggggagtttgcccggacggatgaattgtgatgcttccgttattgcttttccggtggtggaaaggccggctgaagccggtggggacttggtgatggttatggagcacgggcgtttgctttcttccatcagagagcaggctttgccggatgagaaggagcagtcaccgtcatgcaggctgagggcatttgtagataaggaaacaggtctttggggattggaaaagggagatgagatgctgccggacgtttcgtttaaagagattttgagtatcaaaggacgttttgccgtggggaggcttcggaacgggtgtgtccgggtactggatgatacgggggctttggtggccgaactggggcattgctgtgaggtgaggttgctgaaagatgatttgttgcaagtccgtcatgccgggaattcggtgtcttatgtggatttacggaacggccggtgttatgctgtccgcccgcgtgtcctcagatacgggagcatagaattgttacaggtgaaccgtacttattacagcaggacaaggcaggtgtatgccaatacatacgggttgccttcttcgtccattgtgtggatggggttttatgtgaagatgtacgatggcagagtgccttcccgatgccgccgcatggaagatggaggcttttgttgtgaaccgcaggtttgtctgttggaaggggatgaggagcgtgcttattacctgagcggacggttgccggatcaaagtattgtggtgatggatgaggagggacggtattatcatgtggagaaaggacatggaaagcgttatgtggcttgtaaccgtccgtcggaccggagtgaggattttgatgaggcggtggcattgctccgaaggcaggcggacgagcgtgtggagaaacatttgcaggaggaaaagtgcgagactgaacggaaacggcagcgtataatcagcaggagtgtggaggccgtaccttttcagataggagtgaaatgggggttgaggacagcggagcagattttgattccacctgtctatcggagaatattgcgtccggtgggtggttattgcgcctatcaggacagctcctgccagtggggggtgctgactgtagacggaaggatcattatccgggcccggtatatggaggtggagatagacagggatggaacggcgcgtcttactttggttccggggaagatggaaacggtgaagctgacggattaataggataaaaagcaggggataactttttgtcagaccgatatttagcgatggaatacggatcattatgaaaagttttgtaactttgcatccgattttaaaaaaggagatattgatatggaattacctgatgacccgatgatgcttttcagcatggtgaatatgaaacttcgtgactgctatcattcgctggacgagctttgtgatgatatgaatgtagacaaggagctgttggtgaaaaaattgaaggcggccggatttgagtatagtaaggaaaacaacaagttttggtagatagagggatcagcccgttccggaagaatgcttgggacgggctgatttttttattgagatacctattgttgattatttttgtataagtcctgtttccggtattgcaacagggatgttccggtatgccgcttgaagaaacgtcttaaggtggcaagattggcaaaccgggttctttgaacgatttcctgtatgctgatggatggattctccaataatgcgtaaatctcttgcagggtataatgtataatccattctttgggggattttccacttaccagagtcaaggcttcagtcaggtatttggaggaaacatgcaacttttcggcatagaacgccacttctttgttttctttgtaatgctttaacagcaaatccagaaaaaagtatccgatttcttctttatgcaaggtggtgactttatgttcttttactgtgctgtaatagtctgcataaagttccagaaaaggtaatttcagcagattggtaatagattcttttgtaaataaataagttggagaagtagctctgttgtatagtaaccggaaatagagggagaactgttccgctttctcttgggatagcgaatagatgcagtgggtttgggtgtaggtatgaaaaccggtcggaaaacgtttgatacttccattgatcacgtcataaaaaagggcatttgaaaaagtacaataatcgatggtgaaagtcagactggattttataaatgaaaccaagaatcccggcatgaaaataagaatgtcgtttgcacaaataacatatttccggagaccaatctggatctcggcattcccttcagtacacatacccaaaactccttccggcagataagaggggtatttgctgaaaggcactgtgtgcgcatccatataaatactgaaatcttgatcggacagtccttctttggtatcctgtggttttggggtattatataacatactttgtatcagctctaggttcacaaaattagaatttaatgatacattccgccggaagtagtggacataagggaaaataaaacggaaaaaaactacgtgtatttgatttttttaatataatgataggagaacaattttagcttcccgtaagttgtaggagaacacggaaaattattcttttttacagaaagaagggtgaattcaaaaagatcgtttgatttgtttttgaattcaccctttatgaatggagcggagttatttttgcgccagtaatttggctatggcacggtcgggtttcccggtttctgtcaggggaagtttgaataccggaacaaaacgtttgggacgccagtagggaggtaattgatgtgtgcaggtctgttctatgtcgtcgggcagttgcccttcggcaagcagcacaatgatttctccgaatttttcgtcgggagcggaggtgatcaagaaaggaacggacaggtgttctttcaatacggcctctacttgttctatctgcactttcactcctccggtattgatcgtattgtcttttctgcctagaatgcggaattggttctgtccgtttatctcggctatgtcattggtcaccagttcttttccgcaaatttcgggagcgtatatcaccaaggtgttttctttactcagacggatctgtatgctctcgaaaggggtgtaccagtctgaagcttcaggaccgttcagtctgcgtagggcaatgtgtgataaggtttcggtcatgccgtaagtagaccatacggcatgggggaaatcttttaacgcagcgttcaattgggagtcgataggaccacctccgataatgaggtgcctgatttgttgcaatatcgctctctcttcgggaacttgcagtgagttatagacttgcatggggatcatggcggcaaagacgggggcttttgtcaggtcttttaaaggatgcccggatggagtgacaggcagcaagtccagtcccgctactaaggcacgtactaccaccatttttccggcaatgtattgcaagggcatacagagcagggcggaatcttctttttgtagtccgaggaaggaacaggtgaggcaggcgctttccatcatgcgttctttttctacatacagttccttgggtttgccagtggagcctgaagtatgtaccagcagggtgtctgccgggtcaaaccattcggaaagaaaggagaaaagttcctgccggaaacttcggttgtcggcagggatattcattcttaccatttcaatttcccaattggagtaggggatgctttctatcagaatggtttgtttgtttctattggtgcagaattttgtcattgtttcagccagtttagtaaatcgggttcttgttcttcggggtggaaccaaaggcagtccccttcgatgtgaagcggatagtctatattgtcggtaaatagcaagccggtacctagtccttgggggagggcgggctgcaaggtggcacaccattgtgcgatggcattcagtccgatattggactccagagcggaagtgacccatgagccgatgcctctttcagccgccagttccatccattcttcggagccgctgattcctccatgtagagaaggtttcaggataatgtactgaggacggatggtttccagcaattctattttccggtcgcgccggttaatgcctatcagctcttcatccagtgcaatgggaaagggggtggcggcacagagtcgggccatttcatcccattgtcccgcacggatgggctgttcgatggaatggagctggaattcggaaagacgatgtaacttttcgagggcatcggtaggagagaaagcaccgttggcatctacacgcagttcgatttgggttggggtgaaatgccggcggatgtgcgccagcagctccagttccttttcaaagtcgatagcgcctattttgagtttgatgcagcggaaaccttgctgcatcttttccccgatgcgccggtacatctcgtcaaagtttcccatccagatgagtccgttgatggggataccctctttgcctttgctgaacggggtgtgccagaattgcaggctgcgtgcccggaaatgcagcagggcggtttccataccgaacaggatggacggatagggaagcaaggcttcccggtctatttccccgttcttttccaggttcttgcaggcagtggccaacacctcgtcgtatgaggggatatcatcacagctcagggcagggagaggggcgcattcacccacgccatagtggcggctgccggtgtcggtgaggaggatgtaccatacatcccgggtagtatatactcctctggaagtaccggcaggttgcttgaagtgtaattgtttttttataatttgggtttggaacatttttttttatgtgtagttggtttggtatatttatccctgacaatctcaaaggcgcgttggacccatgtgtatatgctcgtgtcgggaatatcaccatcaaaattaagttgaagccaatgtttcagactttggttgatgggattgccgactgaaacatgtctctcttttatatactcaatttcgtccgaagtagatttgacattgacaaaagtgaaattgtcaatgtctataaaacagaacatgtgtccataaacataaaaggcaaggatggaatcatatcttgcagcaaatttgccaaatggcatcttttcggaaacgtcacctaacgaaagacaatattttctgaattcttcaatgtccatgctttgaatttgtagtttgtttatgggaacttcggataatcctggaaccgtggcttgcgtttttccaaaaatgccttccctccttcctgcgcttcctctgtcatgtaatacagcatggtggcatctccggcaagttcttgtatgccggcttgtccgtccagttcggcattcagtccggctttgatcatacgaagagcgagcgggctgtgctccatcatcttttctgcccatgccacggtttcgtcttccaggcggtcgaaaggaacgactgtattgaccaatcccatttccagtgcttcctgtgcggagtattgacggcaaaggaaccatatttcacgggctttcttctgccctacgatgcgtgccagataggaagagccgaatccggcgtcgaagctgcctaccttgggacctgtctgtccgaaaatggcattttctgaggcaatggtcagatcgcataccacatgcagcacatggccgccgccgatggcgtaaccgtttaccatggcgatgaccggttttggcagtgaccggatttgcttttgtacgtccagcacattcagacggggaactccatctgtgccgatataaccgccatgaccttttacgtgcatatctcccccgctgcagaaggctttgtcacctgctccggtcagaaccactacattgatatcctggcactcgcggcagtaatacagggcgtcgctgatttccgaagtagtggtgggggtgaacgcgttgcggtaacgcggacggttgatggtgattttcgctattccgttgtaaaagtcaaacagaatatcttgatattctttgatggttttccattttcttgtttccattattcatttttatttttaagtccgtgataatattctcttaatagggtggtgtctttttccttgtcggtaaacacctccagcagcatgggttgcatccttgtctcgggtgaggtgaatggctgcatcgcttcttccagctcttcttctccggtcactttcatgtaaataaagccacgttcttccgcccagcctttggcggtggtgtaatgctcggctgtgataaactcccgggaacggcttgatttgtccattccaggcagggtatggaatatttctcctccttcgttattcagtaacaggatgcggatgttggcaccgtaattttgattccacagtgcgttcatatcatagaagaagctcaagtcgcctatgatgatgaaattcagcttgctggaagcggcggcataaccgatggcggtggacagggagccttctatgccgttcacgccccggttgcaacagatttccacccggggaggaactgtaaataactgtgcatagcgcacggtggagctgtttgccagatgcagggcacagggttcgggtaatgcctgaatgagttttccgataacggagatttcggaataagcaagatccggcatcggaatggttttgcaatagttttcccacatcagcggataatgggtcggtttgttgtccagcaggaaagctattttttccaagaactcaaacggatccatctcgatgacggtggtcaggcaaccgtataaatcggctatcttcccgtcggcggcaacatgccaatgttcgcgcgggggatgattgcgcaggtatttcttcaattgcttggatacgatatgtccgccgtaggtaatcagtatttcgggggccatgtcttcctggcgctccggcgtcatggaataaacggcggcgtcgaaattcttgataggaatgccggggatggtctggttgcccagatgttccgtcaaccaggcgaaatgtttataaagcggtttcacatattttttttcgaacaggtaaatcagattcatctggcctaccacgaccatgcgcttgttgtacttgttcagccgttcgatcagttccttatagtcacggtcgtacacgctcagtccctgataacgggtgatgacacgtgcctcgggaagtgttttggcggtgaagcgatagatgggttcggaaatgggtacattgatatgtacgggtcctttgccgtggtgggtggtttccagtatggcttcgttgatgaggcggttgcaaaaccattcgtcttcctctgtatgtacttcgggcaggttgacagacatcttgactaacgttccgaacacatggggctggggcagggtttgtccgtccatttgtcctatccaggcggcggggcggtcggcagaaatgacaatcagaggtacttgttggtaaaaagcttcggctacggcagggtgcaggttcagcagggccgaaccggaggtgcagcatactgcggcaggacctcctccttgtaaagataggccgatagcaaaaaaaccggcactgcgttcatcggttacagaataacaagtgaagtcctctatattggccagagtgtgtacgatggcagcattacggctgccgggacaaagcactattttccgcacaccgtgcgctttgagaagtgccaccaactgaagtatgttctttttgtctgaatacattattcttctactttaattgtttccatttgtttacttataaagtcaggatgaaggatgctccgcatcgtattcatcttgtctcccgtttccacccattccgattctacttccgaggaagccagtattcctcctcctgcatacaggatggcttcacccggctttatttccatgcagcgcagattgacgtagatatcggtatgtccctctgtgtccagccatccggtgaatccggaataataactgcggtcgtacccttcgttgttcagaataaaccggaaagcctcctctttgggcaggccgcagacggcgggagtgggatggagttcttgcaataaatcgcctatatggtctgtatttttcaacaagaaataaaaatcagtcttgaggtgtaccaattgtccggcacgggcggtatagggacctttctccgtcatcttgttgccgaattttttggcgatccggcggatataatcagccacatagccctgttcttcttggttcttcttgtcccagtttgtcggcatcacttcgtcctgcatcggcattgtaccagccagggccacggtgtgccattctttgccttgtccgcttaataagatttccggtgtgctgcccagccaggttccggaagcgggggtgtggcataggtaaatcatcatgcgcggataattgttacaggcctggacaaaagcgccaagtggtgaaaaatcatctccgatatgtctggcggaagaacgtgacagaaccaatttttgaaactgcttctcttgtaagggagtgatgaaacgcccgaatgcgcgggtatattgttctttatccgtttcttcggaaacaaaaggagagagttcattctgccggcttttgcaggtgagcagggtatccacacattccagtgaagacagtgcttcgctgatttcattccagtcgtatgccgtgacatccggacggataagtaccaagggatgttcctccgatatccggaaaggagccatgacaaatccctttttttcattcagttcttgaatgtccgctaattgttccacatcgcccgaggtttgcaataccaggtagcattcgtctgtccaaggtaaccggtagagggcgaaaccgaggcggctatgtgtcaggcaatccaataatttttgcgtatgtatatctggtagattcatttctttttcagtatgaaattaacgacacgaacagtagaaaccagttctccctgtggagtggtgatatctatattccatatatgcgaggatctgccgcggtgaatcagtttgccggtggcgaatactttgcctccgacgggtacggccgacagatgatttccacttacttgtactccgcaggcatattcgccttcccggcatagcgacatggagccatgtcctgccacaatctcggccagagccagtgacgcgccgccgttcaacataccaaagggttgtgaagtacgatggtctacaggcatttcggcatgtaccgcattctcggtggggggtagaaaccggatacccagatgttccgccatcgaattcgaataatcaggtttgcaggttatttcttccatcatttgtatgtctgttcttttctatagggctacaaaaatacataaattttagatgaaaatgtcgctaatgttgttcttttaagaacaaaaacattcggggtttgtttctattttcggaatatattttttattttgcaaaaagaattcgtacaaatgcaacaacgaatgaataaaacaataatttaatacctatgctcattacgattattatccttgtactgtccgcagtattttttgtaaatggcaagatacggtcggatcttgtggctctttgtgctttagtggctttgttgatttttcagatattgacgcctgacgaggctttgtccggattctccaattcggtcgtcattatgatggtggggctgtttgtggttggcggagcgatttttcagacgggacttgccaaaatgatcagttcacacattctgaaattagcgggtaagagtgaattgaaattattcttgcttgtaatgttggtgacttctgctatcggggcttttgtgagcaacacaggtacggtggctctgatgttgcctatcgtggtcagtctggcagtcagtgccaacatgaatcccagtcgtttgcttatgccgttggcgtttgccagcagtatgggaggtatgatgacactgattggtacgccgcccaaccttgttattcaaaatgcgttgacttcggccggttttcctccgctttcgttcttctctttttttccggtagggattatttgtgtggcagtgggtactttggcgttgcttccgctcagtaaatggtttctttcgaaacgggggaaaaacggagacgacaatgttcattcgggcaaatccctgaaacagttggtgaaggaatatgggctatccagtaatttgttccggttgagggtggtcggtgactcccggctgcatggaaagacgattatagagttggatatccggcgcaagtatggattgaatatactggaggtgcgtcgtggggatatgtcacaacaccgcttcctgaaaacaattactcagaagctggccgatcccggtacggttcttcagaaagaggatattctgtatgtgacgggggattttgagaaaataaagttgtttgccgaagattatctgctggagatgctggacgagcatactaccgaagaagcgaaaaactcagccaattcattggatttttatgacataggtattgctgaaatcgttttgatgccttcctccaatctgataaaccagacgataaagggggcgggctttcgtgataagtttaatgtgaatgtactgggtatccgccggaagaaggaatatttgttgcaggacttgggcaatgagcggattcatagcggggatgtgttgctggtgcagggtacatggaacaatatcgcccggctgagcaaggaagatgccgactgggtggtactgggacaaccgctggccgaggctgcgaaggtcacgctggattacaaagcaccggtagctgcggttatcatggtgctgatggtggcaatgatggtgttcgacttcattccggtagctccggtgacggcggtgatgattgcgggtatcctgatggtactgacaggatgtttccgcaatgtggaggcggcttacaaaaccattaactgggaaagcatcgtactcattgcggccatgctgcctatgtcgctggcattggaaaagacaggggcttccgaatacatttcgaacagtctggtcagtgaactgggaacatacggaccgttggcgctgatggcgggtatttatttcactacttccctgatgacgatgtttatcagcaacacggctaccgcagtgcttctggctcctatcgcgatgcaaagtgcaacgcagataggggtaagtcccgtaccttttctctttgcggtaacactgggggcaagtatgtgtttcgcttcgccattctccactccgcccaatgcgctggtgatgcccgccggacaatatacctttatggattatgtaaaggtagggctgccgttgcagattattatgggcattgtcatggtgctggtacttcctttgctgtttcctttttaagttgtttataatatatgatgccgatgacgtccgctataaaccatccgataggaatagaccaccagattccgatgaccccgatggcaggaatgccggcaagccaataggaaagggctacacgggttcccaacgataccactgtgagcactacggacattcccggcatacggatggcccgataatatccgtataacaggaacaaaatcccgattccgcaataaaacgctccctcgatgcgtaaataactgataccgatgttcagaatttccgtttcgtgggggcggacaaaaatcagcatcaatggtttggcgaataaaaagaccagaatggaaatgaccagagagaagagaacggtggtaatcaaggcacttttcactcctttgcggatccgttcctcttttctcgctccgaagttctgggcaataaaggtggaaaaggcatttccgaattcctgtaccggcatataggcaaacgagtctatttttattgctgccgcaaaggcggccatgactacagtgccaaaactattgaccaatccttgtaccatcagaatgcccagattcatcaccgactgttgtacacaggtcagtgcggagaacgaagtgatctctttcaggcagtgacggtcgaaatgcaggtcgttgcggtgtaatctcagttcggggtatttcacgtaggcatatcccataattcccaaagcggatactccctgtgcggccaccgtggcgatggctgctcccttgattccccaatccaactgcaagataaagaataaatccagcccgatgttcagtacaacggaaaccgccagaaaccaaagaggagtaacggcatctcctatggcacgcagtaatgccgcatagaaattatagataaaggtaaagccgattccccaaaagataatccacaagtaatcatacatcatgccataaatatctttgggaatctgcaataacctgagaatgggatgaatccagacgaaagccgctatatttagaatcaatgttactgtaccgatcagcagggcggatacatagatgttacggcgtagggaatccgttcgtccggctccatattgcaaggaaaaaacggttccgcttcccatggacaatcccagcaggatggaaatgaggaaaaccatcagcgtataggcggaaccgacggcagccaatgcgccggaacctatacattgtcctacaatcagcgtgtcggctatattgtaacactgttgtagcagtgagcctataatcataggtaaggtaaaacgtagcagagtgccggtgatacctccctgcgtcaagtctattttagataacatgatgcgtgtctgttcgattcaatttcttatttattttgaaatttattgcgaaggtagggaataaaatatcaaacaacaataaagattgtctatttaatacccggaatgttctttctccttaaaaagagttaacttgataatattttccataggaaactttttattataagaaatatcatgtatgtttgcataaagtttccattggaaaatattaaatcaaataaaatagtttaattatgaagtatatagtaataggaggcgtagcaggaggtgcaactgctgccgcacgtatcagaagaaacacggaacaggcggaaatcattttgttcgagaagggagaatacatttcgtatgccaattgtggtctaccttattatataggaggtgtgattgcggagcgggaaaaattgtttgtacagactccggaggcttttgggaaacgttttaacatagatgtgcgtacccggtccgaggtaatagccatccattctgccgagaaaacagtggatattcgtacttccgacgggaaaacttatacggagagttatgacaaattattgctttctccgggtgcgtcgcctgttcgtcctcccttgccgggcattgacaatgaagggatttttaccctacgtaatgtgaatgataccgatgctatcaagagttacttgcagcagcataaggtgaaacgggcggtaatcatcggggccggattcatcgggttggagatggcggagaatctgcaggaagccggtgcggaagtggcggttgtagagatggcaaatcaggtcatggctcctattgatttctctatggcttctttggtgcacgagcacttgttgcagaaaggagtacatctctatctggaaaaggcggtggcttctttcgaacgcacggtcaacggactggaggttgttttcaaatcgggcgaaaggctgcctgccgatatggtgttgttatccatcggggtacgtcccaatacctcattggcgacagaggccggactggagataggggagatgcgcggtattaaggttaatgattacttgcagacttccaacgagcatatttatgcggtgggcgatgctatcgagttccgtcatccactgactgatagaccgtggttgaattatctggcaggtccggccaaccgtcaggcgcgtattgtggcagataacatggtctttggaaataaggttacatacgaaggggctgtcggtacttccattgccaaagtttttgatatgactgtcgctgcttcgggccttccggcaaaacggttgaaacaggcaggcattgattatttgtcggcaaccatccattccggttcccatgcgggatattatcctgatgctttacagatgtccattaaaataactttctctcctgtgaatgggaaattactgggagcacagattgtggggtataacggagtggacaaacgtattgatgaattttcgcaagtgattaagcataacggaactgtttatgacttgatggctttggagcaggcatatgctcctcctttctcttcggctaaagatcctgtagcagtagccggatatgtagctggaaatatactgagcggaaagatgaagcctctttattggcgcgagttgcaggctgccgatttgagtaaagttacgttggttgatgttcgtactcccgatgaatttgcactcggtgctttgaaaggggctgtcaatattcctttggatgatatgcgcgaaaggatgaaagagattcctcaggataagccggtctatttgtattgtggagtagggttgagagggtatttggcttctaatatattgttacagaatggttttggggaagtaaagaatttaataggaggtttgaaactgtataaagcggcaacggctcctctgcccgagccggaggagttttcaaattccggttcttcaagttctgattcttcaaaagttgatcattctgaacacagtaaagattctgctggagcttatactattgcctcttccgtcattccttctatgaaagcaataaaagtggatgcttgtggcatatcttgtcccggtcctatcatgaaactgaagaagagtatggaagaactggcggacggcgaacgtttggaaattgtcgctacagatgccggttttccccgcgatgccgaggcatggtgtcagactaccggaaaccgttttgtttcagtaaattcaggagcaggaaagtatcaggtaattgttgagaaaaatactccgcaatcttcttcctcggaagtttgccgggaggataaagggaaaacttttattctgttcagtgatgacctggacaaagttttagctacttttgtactcgcaaacggtgcggcggctacgggaaagaaggtaaccatcttctttactttctgggggctgaatgccatcaagaagctggacaaacctgtggtgaagaaagatatctgggggaagatgttcggcatgatgctgccttccagttctttaaagttgaagttgtctaaaatgaatatgggcggaatgggagctaggatgatgcgatatattatgaataagaaaaatatcgattcattggaatctctgcgtactcaagccattcagaacggagtggaatttattgcttgccagatgtcaatggacgtaatgggtgtgaaacgtgaggaattgctggatcatgtgactattggtggagtggcaacttatatgaaccgtgccgaacaggcgaatgtaaacttgtttatttaaatttgcatggagaaaataaaatcaatatgtgtcatgagagagctgttcaaggctctctctgaacttgaaacccgcttaatggaacaatatggagtgtcattgaatgaggcaatggcactttgttgcattggcggagatacgctgacggctagtgtgatatcggaaaacacaggtctgtctgcttcgcatacctctaaggtcatccgttccattgaagagaaagaattaatcgtccgtaatttgggggataaggataaacggcagatgcattttactttatccgataaagggcatgaatgtttggaagcgctgaaagcaaatgaaatagaaataccggaactattaaagccattgtttaaataaacccttctcttttccatttgtttattccggatatgaaactggagaaatggaaaaacaaatggaagaagtggagcaatctgcgcaaatggcaaatatggaaactgaagctgattgatgcccgtctgtatttcgtgagcatattcgtggggctgcttacgggactggttgctgtgccttatcactatcttctttggtatttctttgatgtgcggaaaactttttttacggcacattatccgtggtattggcatgtattgttgttttttatcttatgggggattctgatctttgtcgcttctttggtaaaacgtatgccattgatagccggtggtgggattcctcagacacgtgcggccaataacggtcgtatccgttatgagcatccttttaaagaactggtagctaaattctgcggaggggtgttggctctcagtgcggggctgtctttgggacgcgaggggccgtctgttcagatagggtcttatataggaacacttatctctcgttggggacatattctgaaaggggaacggaaacaattgctggctgccggagctggtgcgggcttgtctgccgcttttgctgctccgttgtcttcttctttgttggtgatagaatccatcgagcgttttgatgcacctaaaaccgctattactaccttgttggccggcgtggtagccggaggagtggctagttggatgttccccacgactccttatcatctgattagtgcggtcgttcctggtttatcttttatccgtcaggcggagctttatattatctttgccgcccttatggctgtcattgcaaagttttattcgctcatcgttcctttctttcaagaaaggatacctgccatgaaactctccattcctgtcaagatgttgtatttattaaccatagcttatgccatatcgttaacagagacgaatctgacaggtggcggagagcagtttttgatgatgcagggaatgaatggaactcatgatatccggtggcttactatcatgatgcttattcattttgtttttacgctgttttctctttcttcgggtttgccgggaggaagtttcattcctaccttggttacgggaggattattgggacaaatcttcgggttggtattggtacagcgcggatggatagggtatgagaatgtgagttatatgatgctgatcgggatggtggcttttttggtggctgtggtgcgtactcctttgactgctattgtcctgataacggagattaccggtcatttcgaggtattctatccttccattgtggtaggtggattgacttattatttcaccgaattgttacagataaaaccttacaatgtattgctgtatgacaggatgttccgtagccataatccggagtcttccgaagaggctggtgctcgctatcatctttttgtcgagataatggatgggtcttattttgacggaaaggaagtggatacattggctttacctaatcattgtatcattcgtagtatacatcggaatcgtaaaaacttacttcctcaggggcaaaccctggttcccggtgatcaagtggagatagaaatagatgcgcaggatatagaaaaattatacgaaccgttggtcagtatggcaaatatctattaaaagaagagtctaaaaaagcccccgttaaaggacgaggacaacctaaatgttttcacaacggaataatccttattgtgacttgcttcaaattagtattgcaaaactatgaaataaatatgtaaagaacaagtgattattagaataatttgataactttgaaaagttttgataaaatagttgtcttatgaaaaatatagtgggtcttgatttgggtaccaatagcataggttgggcagtagtaaatggaagtgtcaatgacgatggaagtgaacaattggttaagatacaagcttctggaagtcgcatcatacctatggatgcagctatgataggagattttaataaaggtaattccatatctcaaactgctgaaagaaccagattgcgtggagttcgtcgtttaagcgaacgatatctgcttcgcagagaacggttgcatagaattcttgatattttaggatttttgccttttcattttgctcaagatttagataggcatggtaagatagttaagggcaaggaacctaaattggcttggcgtaagaatgaagctggtcagtttgaatttatattccaagattcatttaaggaaatgctggaggattttaagctaaatcatccgaatctgataacagatgataaaaaagtaccttatgattggactatctactatctccgtaaaaagggattgacttctaaaatttcaaaagaagaattggcgtggatattattgaattttaatcaaaagcgtggatattatcaattacgtggtgaggaagaggaggaaaataagaataaattggttgagttctatgctcttaaagtggttgcagtagaggattccggagaaaaaaagggaaaggatatttggtataatgtgcatttggaaaatggatgggtatatcgaagaacaagtaatatgcctcttgattgggttggaaaaactaaagagttcattgtaactacggatttagagaaggacggaactccgaaaaaagataaggaagggaatgtaaaacgctcttttcgtgctcctaaggaagatgattggtcattggtcaagaagaaaacagaagcggatattgatcaaactcataagacagtaggtgcctatatttatgatacgcttttaggaaatcctagtcagaaaattcgtggaagactggtgagaaccattgaacgcaaatattataaggaggagctgaaacagattttggagaagcagaaggagtttcacctggaattgcaagacagagcattgtatgctgcttgtgttgaagaactatatacaataaatgaagcacatcggaataatattggtaatcgggattttacttatttgtttttagaggatatactcttttatcagcgtcctcttaaaagcaaaaaatcattaatagacaattgcccttatgaggagaatcattgccttgataaggaaacaggagagataaaatcttttcctgtaaaatgtattgctaaatcacatccgttatttcaagaatttcgtttgtggcaatttatagtaaatctgcgtatttataggaaagacctggcacaagatgtggatgttacaaatgagttattgaagactgaagaagattatgttgctttatttgactggttgaatggtaaaaaagaaattgatcaaaaggcttttttgaaatatccgctttttggactgaaaaaagaggtagagaattatcgttggaattatgtacaagataaaccttatccatgtaatgaaacccgttcatcgatgttggcgcggctggagaaatgtgatatttctattgaattcctgacaaaagagaatgaggaagctttatggcatatattatattcggttgaagataagaatgaaatagtaaaagctttgcagaaatttgcggataaacatgacttgaatgcttcttttgttgatgtgtttcagaaattcccaccttttaagaaagaatatggttcctattcggcaaaagcaattaaaaaattattgcctttaatgcgtatgggaaaatattggagtgagaattcaatagataaaggaacgcgtgaacggatggataagataataacaggagaatatgatgagaaaatagaaaatagagtgagggagaaagcaattcatcttgctgatgtttctgatttcaaaggtttgcctctttggttagtgtgttacattgtttatggtcgtcactctgaagcaaaagaaataacccagtggaaatctcctgctgatattgatttgtatttaagatcttttaagcaaaattcattgcgtaatccaattgttgagcagattattattgaaacactacgtgttgttcgtgatatttggaaacaagtgggaaatattgatgagatacatgtggagttggggcgtgagatgaagaatccggctgacaagcggaagaaaatgacacagcaaatgtctgaaaatgagaataccaacttgcgtatcaaatatttgctcacggaatttttgaatcctgaatatgaggttgaaaatgttcgtccttattcgccaagtcagcaggatattttgcgtatttatgaagagggtgttttaaatagtcctgaattcaaacagacaatgcaacagtgtcgaattcattgttagttaataatttatatttttcctttggggtcatgtaacccaatctttttctcggtcttgagtttaagatgttttgaacgcgcattacctgttcattggttatgtccctaaagtccgtacccttcgggaagtattgcctaatcaaaccattgctgttttcattggctcctctttcccacgagtggtatggttttgcaaagtaaacaaaaatatcctcaaatccgcaactacgcgcctaatatgatacagaagcgaaaagaatctgcatcgttagtaaaaagggggcacagtgcatcgaatgtcaccataaagacatataaatgccccttaccccaccatgcgacttgaggcaatacgcaaaatcacgactataagttgtcggtgttatccaaagtcattctggaacacattggcataagcattgttgcatgaatagatattcagcacatacttccttgatgtcctgacccatttggctggcacagagatgaacttaaagacaaacgtcttgatgcggcttgttgctttgagtccgaacctcttcacgtcaagcctcgccatgatgaatttatagaagttgcgtatgagtgccataagcagaagaaacaccgtgttttctcccataaaggattttggaagcctgttccagccgaatccgttattcatatcatcgaagatgcgttccttccctccacggaggttatagaattcgacaatctctttctcggaagactcgtagtcatttgtaaggatgcagcggtaggtgtattctccttcccacaggtcgagttcgccgtctatccgcttctgtctttgaatcacaagacggtatgccttccctttccatttctcgatgagaatggaggccagctcaaactcaatgccgcccaattccactttcttccaacctctgagggcaaagatgtcattgtagagcgaactgcatcggttagcacggatatagaaggtcttgcagtgtttagcaatctcttccactatctcttcagaacacgagccgcaatcagctctgaaacggttgataataagcttgttttgttcaaacctttcaaagaacctcttcagcgtgtccttctggtggaaacggacatttgtgttgccgtcgctgttctcaatgccgacaatcaagttgccaataaccgccacgccagggcgataaccaaggaacttcttgtatgtaggcttcgcatcaaacttctcagcctctatgaactggtggtcgaagtcaacgtcatacccctcgccctctttcagctgccctgtggacaataggcaattgaggagcagtgtattcagcttgtctgccgtgttgaagtcgtaggtcttgccagtgtcggatgtgtaggaaatgttatcctgggtcagttcctttatggctctaagaatcgtgtcggcactgcatgtgcgaagtgtcggatgaagcgaaaggtggtacatcagatgagtggtgacatcctcgatgcatgagccgccacaaaaataaacgctcataagcgaacggatgatttcgctgtattgataaccatacagcctgcatctcataccgagggttgagtcgattacagatgagagtctggagtcaaattgctccattattgaaaatattcctccaaaaggagtgagtttctcggatttaattgctacctttgccatgtctgtcgggtttgatacatattttgatttgcaacactaagataggtgaaaaatctgacatggcaaattcctgagcaactttttgttgctcaggtacttaaaaagttatatttgtaatagtgttgcggaattaaggaatatttagtttacgtgcaatttcttcgtgaaaactaaattcttttccattatctgccgttattgtatgtatttggtctctaaaaggttccaaggcatcgatggcagctttagttagcgggctggcatctttcccgctaagtagtcttatccatactagtccagttaccctgtcgtttatagttaatagtgctcctttgtgattcattccaatgactgtgtcaatttccaaatcaccaaaacgtactttcttgtctactatcgtaggacgcttgtctatgtccacgcggtttttgataaaaccacgtccattagtcaatgcacctctcttcttatgacttcttccccgtcttcttaaatgcttgtataacaacttatctccatgctttttatcttcccaaatatactggtagattgtctcatgagaaactgtttccaagccctttgttcgcataaacccagtcacttgttctggactgaaatctttctttatgagtatatctacttgaattttcaagtcgtccgtaaacttcacgaagtgctttcgtgaacgcattctggacatatacttagcctgagcgagatccggtttgtaaatgccattacgtttatcactattacgacgtaattcacgacttatagtgctacgatgaactcctacaagattggcaatctcggttcttgactttccgctttgcagataagcggaaatgttatacctttgttcttcggttagctgtttcatattgcaactgaatgttggggaactggaagatgcaaagaaacaacttttccacaggggaacaaaagggaaagaaatcttctttctctgttcctctgaaaaattattcttttcgtatcttctcattgtcatcattctcactcctgttgcattatccgcttgaacttaggagtgtttccgatttaccggaggaaatatcggatatattgaaaaagtttacagaaacagacttgaaaaagcgtccttcaaggtcagaagttttgcgttacaagctttggctggaacagaagtatcgttctccttataccggtgaagtgattccattaggtaagttgtttacgcctgcatatgaaatagagcatgttattccccaatcatgttattttgatgattcttttagtaacaaggtgatttgtgaagcggaagtcaataagcttaaaagcaatttattgggacatgagtttatagtgaagcatcatggggagatagtggaacttccttttggaaaaaaagtaaggatcttcactgtggatgaatatgagcaatttgtgaaagataactattcgcgtactcgtagtaaaatgaaaaaactcttgatggatgatattccggaggagtttgttgctcgtcagctgaatgatagtaggtacatcagcaaagttgtaaagtcccttctttccaacatcgttagagaaaaaggagaggaagaagcaatttcaaagaatgtaattccttgtaccggaggagttacggatcgtttgaagaaagattggggaataaatgaggtttggaataaaattatacttcctcgttttcaacgactcaatgagttgaccggcacaaataaatttacaactaaaaatgttgggattcaagaaattccgacaatgcctttggaattgcaaaaaggttttaataagaaaagaatagatcatcgtcatcatgcaatggatgccataataatagcgtgtgcaaataggaatattattaattatttaaataatgagtcggcaacagctaaggctgaattatcccgatatgatttgcaaaaaatgctgtgtgataaagctaagactgataataacggtaactataaatgggtgatcagaaaaccgtgggcatcgtttacacaggatacatatttggctttggaaaatataatagtcagttttaagcaaaatttgcgtgttataaataaagctaccaatcacttcttgcattataatgaagaaggcaaaaagatctttgtgaaacagggaaaaggggacaactgggctatacgtaaatccatgcataaagatacggtatttggagaagttaatttgcgtaggataaagactgtagctttaaatgaagcgatgaaaaatcctcaaagcatcgttgtgaaagacttcaagagaaaattattggaactttggaatttaggatttgacgcgaagagaataaagaagtactttgaagataatagagaaacttggagtgatataaatctgtctaaaatagaggtttactattttagtaaagatactaaagatcgattctttgctactagaaaaccgctggatactagttttgatagaaagaaaatagaaaataatattactgatacaggtatccaaaaaatattgttacgtcatttggaactgaaagataataatccggatattgctttttcgccggatggtattgatgaaatgaatcgtaatattattcagctgaataatggaaagtatcatcagcctatcattaaagttcgttggtatgaacaggctgataagtttgcagtaggtcaaacaggtaataaatcttctaaatttgtagaggctgcgaaaggaacaaatttattttttgctgtatacgagtcgaatattctagataaaaagacgaatactataataaagaaaagaaattatgctaccattccactgaatgttgcaattgaacggcaaaaacaaggtttacctgttgcaccggaagatgagaatggtaatgaccctatttttgtattgtcacctaatgatttggtttatcttcctactgctgctgatttagctaatggtattattgcccagcctttggataggggaaggatttataagatggtaagttgtacgggaaatgaaggatattttatacctgcgagaatagcgaatcctattttacaaacaatagaattaggtagtaataataaggcgcaaaaggcatggacagatgaaatgataaaagaaatatgtatgcctataaaagttgatcgtttaggaaatgtcttagaatcaagtagttcatataaaaaataatatattcttattttatggaagaaaacaaaggacaaattcttttatatcaaacggtagatggtgagtcaagaattgaagtaacactatgcaataatacagtttggctgacattagatcaaatggcagaattatttcaacggaacaaatcaacgatttcacgccatataaagaatgtttttgagagtggggaattacaggaaaattcagttgttgcattttttgcaacaactgcttctgatggtaaaatatatcaagtggcttattataatttggatatgattataagcataggctatcgggttaaatcttaccgtggtgtgcagtttcgaatatgggcaacacaaatactaaaagagtatttagtaaagggatttgtaatgaatgatgagctgttgaagcgtgcaggtggtggaaattattttgatgagttattatcacgcatacgtgatattcgttcctcagaaaagatattctatcgtaaaattcttgaaatttatgctttgagcatagattatgacccaagtactgagtctactcgattgttttttgccacggttcaaaataaaatgcatttttcagtacatggacatacggctgctgaggttatttacggtcgtgcagatgcagggaaagattttatgggattaactaattggacaggagcagtgccaaagcggaatgatatagaatatgctaaaaattatttgacagatgatgagttggatacattaaatcgtattgtaagtttgtatcttgactttgcagaattgcaggctaaaagtcatactcctatgtatatgaaagactggattcaaaaattggatgattttcttagattgtcaggaaaagaattgttacaacatgctggtactatttcggctgaattagcaaagaaaaaagcaaatcttgaatatgatgaatttaagaaacgcattagtaatcagttatctcctgtagaaatagatttcattgaaaatttcgaaaaagagcagaagaaattgcgaggtaagtaatatattaacctttaaaatatgatactatgataaagaaaacactttattttggtaatccggcttatttgtcattacgaaataaccaattagtcataaaacttccggaagttgagaaaagtgattcattgccggatatctttaaagaacaatcggaaataacgaagccgattgaagatataggtgtcgtagtactagatcataagcaaattactatcacttccggtgtattagaatctctattagagaataattgtgccgttatcacttgtgatagtaaaagtatgccagtgggtttaatgctccctttgtatggaaatacaactcagaatgagcgtttccgtcaacagttggatgcatcattgccattgaaaaagcaactttggcagcaaacaattaaggcaaaaatagataaccaagcatctgtattgagagtttgtgtaggtgaagaaatgaaatgtatgcgaatttgggcgaatgaagtgaagagtggtgatccagagaatttggaagcacgtgcggctgcttttttttggaaaaatttatttgcagatattattggctttactcgtgacagagaagggatttctcctaataatttattgaattatggttatgctatacttcgtgctatcgttgctcgtgctttagtggcaagtgggttgcttcctactttagggatccatcatcataatcgttataatgcatattgtttagctgacgatgtgatggagccatatcgaccttatgttgatgaattagtatttagtttagtgaaattgtatggtgcaaatttggaattaacaaaagaaataaaatcacgtttgcttgttattcccacattggatgtacgtattaatggtaaacgtagtccgttgatggtggctgtcgctcagactacagcttctctatataaatgtttttgtggagaaattcgtcgtattagttatcctgaacgataatggaccgttttagtgaatatcggattatgtgggtactagtattatttgatttgccaacggaaactaagaaggacaagaaagcttatactgattttagaaaaaatctacaaaaggatggctttacaatgtttcagttttcaatttacgtccgtcattgtgctagtagcgagaatgcaactgttcatataaatagagttaaatcttttttgcctgaatatggacaagtgggaataatgtgtatcactgataaacaatttgctgctattgaacttttttatggaaagaaactacaaggtgtaactactccaggacagcaattggaattattttaaaaataagaaatcccgtctgaaacgggatttcttattagataacaactttgtttttaattcctgaatatgtgtgtaactaattggtaattagtttgtaacatatattctgttgtttccaatggttcaaagatactaatttgaaagcaaatcacaactattttccataaacattctatttaggcaagttgtttccaatggttcaaagatactaatttgaaagcaaatcacaactcatgctgaactcgtcattagcataaaccagttgtttccaatggttcaaagatactaatttgaaagcaaatcacaacaggcatctttttccctatcgttaaccgtttgttgtttccaatggttcaaagatactaatttgaaagcaaatcacaacccacttcttaggagtcaccagcacaatcctgttgtttccaatggttcaaagatactaatttgaaagcaaatcacaacgtcgacttcacacttgagcatcgctgtcaggttgtttccaatggttcaaagatactaatttgaaagcaaatcacaacgatgactccaacagtttgttcagcgatgttgttgtttccaatggttcaaagatactaatttgaaagcaaatcacaactgtctggttctgctgctcagactggtgccggttgtttccaatggttcaaagatactaatttgaaagcaaatcacaaccttcatttgctcaagcaaagaaacttattgttgtttccaatggttcaaagatactaatttgaaagcaaatcacaacctcagatgacggactatatgacgtctgctggttgtttccaatggttcaaagatactaatttgaaagcaaatcacaactgctaagacgaagtccgctacgccttatgggttgtttccaatggttcaaagatactaatttgaaagcaaatcacaacacaggttcgtcttcgatgatcacagccagggttgtttccaatggttcaaagatactaatttgaaagcaaatcacaactctgctgaaatcaatttgcttaacatgattgttgtttccaatggttcaaagatactaatttgaaagcaaatcacaacaccatcatcacccttgtcgcctttttctcgttgtttccaatggttcaaagatactaatttgaaagcaaatcacaacctaacctttatgctcaaggttccctttcaggttgtttccaatggttcaaagatactaatttgaaagcaaatcacaacacgctgtgggcgaatatggaccagttcactgttgtttccaatggttcaaagatactaatttgaaagcaaatcacaactgtatacacacttcaggactaaaggcccatgttgtttccaatggttcaaagatactaatttgaaagcaaatcacaaccgctacgggcgaatacggacccgtacatttgttgtttccaatggttcaaagatactaatttgaaagcaaatcacaacgcgtatgatcttcttatggcgtcttcgccgttgtttccaatggttcaaagatactaatttgaaagcaaatcacaacacattgttggtttgtaacattgacgtatgagttgtttccaatggttcaaagatactaatttgaaagcaaatcacaaccagagagtatgttggcagaggaacagtcaggttgtttccaatggttcaaagatactaatttgaaagcaaatcacaacatcttcagaacaaccctggcttgcccgtatgttgtttccaatggttcaaagatactaatttgaaagcaaatcacaacgttcatcaaagcgatggcgaaggaaatcgggttgtttccaatggttcaaagatactaatttgaaagcaaatcataacatattagctgagaatccctagtcgagtaagaaatcaaaaatttcatctgggttctcatctaggttttctgggtcatcataataagaatctaggttatcaagatagaaatcatattctgatgattgattaccaaatctctgatcatactgttgttgtgatagcttagtaactttatcaggattcctatcggcataagcagatgcctcttctattgacatttgtttggtagaagtaaataccaagtaatataattgtggcttggtataatgagtatctaaagttacttgttgataaccagatttccttgcagtaactattacgttttctggtgtgatagtagttttcaagatataggtatagattctttgatttctaagtgaatcccttagtaatttaattgaatctactttagcaaagaatatagaatctcttctaagttcttctttatatcgttttacccttttgatagaatcctctctgctctcctttatataaggaggagttaccctcctaggttcattgtttaatagaacaagacccagaagagaaactccaaatatagaaaatggaagtaaaagatgattcgtttttgagttcatacccactagttttgtattgatctttaatatgagaatttaagtacctacctcttagattcactttttaataatcttttgagttgctctttagaactttatcatatcggtatactttgttatttttaaaagatacccatagatgatgtttctttacgttgtaaccaataccttctatattagaagattctactgatgttatttctattccagcattcattttaactaattcaagatattcttctctgtccattctattaaaattttagaagtcttaactccggatgtaatgcgttggtatatttttgaataattgcccatgctctcagatgttatccattcttctttcatttttcataggatatgagagcaaacatataactgatactttgtaagagttttattatgttatctaatacccctcttatttctccctcttcaatctgaagaagttttttaaaaagatagtgatctgtatcctctcaattatgttgttttcattgaccttaattccgcaacactattacaaatataactttttaagtacctgagcaacaaaaagttgctcaggaatttgccatgtcagatttttcacctatcttagtgttgcaaatcaaaatatgtatcaaacccgacagacatggcaaaggtagcaattaaatccgagaaactcactccttttggaggaatattttcaataatggagcaatttgactccagactctcatctgtaatcgactcaaccctcggtatgagatgcaggctgtatggttatcaatacagcgaaatcatccgttcgcttatgagcgtttatttttgtggcggctcatgcatcgaggatgtcaccactcatctgatgtaccacctttcgcttcatccgacacttcgcacatgcagtgccgacacgattcttagagccataaaggaactgacccaggataacatttcctacacatccgacactggcaagacctacgacttcaacacggcagacaagctgaatacactgctcctcaattgcctattgtccacagggcagctgaaagagggcgaggggtatgacgttgacttcgaccaccagttcatagaggctgagaagtttgatgcgaagcctacatacaagaagttccttggttatcgccctggcgtggcggttattggcaacttgattgtcggcattgagaacagcgacggcaacacaaatgtccgtttccaccagaaggacacgctgaagaggttctttgaaaggtttgaacaaaacaagcttattatcaaccgtttcagagctgattgcggctcgtgttctgaagagatagtggaagagattgctaaacactgcaagaccttctatatccgtgctaaccgatgcagttcgctctacaatgacatctttgccctcagaggttggaagaaagtggaattgggcggcattgagtttgagctggcctccattctcatcgagaaatggaaagggaaggcataccgtcttgtgattcaaagacagaagcggatagacggcgaactcgacctgtgggaaggagaatacacctaccgctgcatccttacaaatgactacgagtcttccgagaaagagattgtcgaattctataacctccgtggagggaaggaacgcatcttcgatgatatgaataacggattcggctggaacaggcttccaaaatcctttatgggagaaaacacggtgtttcttctgcttatggcactcatacgcaacttctataaattcatcatggcgaggcttgacgtgaagaggttcggactcaaagcaacaagccgcatcaagacgtttgtctttaagttcatctctgtgccagccaaatgggtcaggacatcaaggaagtatgtgctgaatatctattcatgcaacaatgcttatgccaatgtgttccagaatgactttggataacaccgacaacttatagtcgtgattttgcgtattgcctcaagtcgcatggtggggtaaggggcatttatatgtctttatggtgacattcgatgcactgtgccccctttttactaacgatgcagattcttttcgcttctgtatcatattaggcgcgtagttgcggatttgaggattgattcaaatataccaatttagatatgaattatccttaattattaattcttattatatcaaagagtttaaagtgggttggaggtaaaactttgcagcatataatgtgtatatagaaaaattatacgaaccgttggtcagtatggcaaatatctattaaatttgccgtatgaaaaagaaattccagcttgaagttccgggaggagccgacaaggtgttgcttcatacttgttgtgctccttgttcatcagccatcatagagtgcttgatgcagcatggtgtcactccggttatctattattgtaatcccaatatttatccgttggaggaatacattatccgcaaggacgaatgtacgcggtacgcccagtccttgggattggaaattatagatgccgattatgatcatgatgcctggcgttgtcgaatggcaggaatggagcaagagcctgaaagaggaggccgttgcttgcgttgtttcaagatgcgactgcaggaaaccgcacgttatgcccacgaacatggattcccggttatcactactacgcttgcttccagccgttggaaaagtttggagcagatagaggaagcgggccgatatgctacggccccttatccggatgtcacttattgggaacagaactggcgtaaaggtggattgagcgagcgtcgcattgctatcattaaggaatataatttttataatcagcaatattgtggctgtgagttcagtatgcggaaagaagaaaaggaagaatgacaggaatgaggatgcttaaactgtgggtggttgtaatgttattgggactcttgcccgttgtttcagaggcgcaagaagaaataaataatgccattaatgtacagttggagtatctgaaaaagtatcctaaagataaagaagcgcttcggaaagttagttttctctatctgaataaagcagattatgatcaggctatcttttatggtcgacaattgtttgagataggttataatgaacgggattacaatggcgctgtaatttattctcatatttgtctggggcaggcccatatgatgaagggaaatgtaaaggaggcttatagtcatttagggcaggccaggctgataggtgaaagtaataaaaatgattccgccttatgttccgtatataatggtctgggactttatgcatcgaatgtccaaaaagactattatcgttcacttacttatttcttcaaaggagttgaagctgcaagacgttgtcattatgacagactctattccattttactttctaatattgccggtatttattatttaaaaaatgatagcacaggattgaaatatgcccttgaatgttatgaactgggacatgaacggaaagatccttatctgatttatagtggttcaaccaataccgcttatatgtattatttgaagagtgactataatacagcattgaaatatattcaggaggcggagttcaccatggtgcagaatgacttttatgatcaatcaaacgtttacaatctttatggatatattctgcataaattgaataaagatgatgaagcgctgggctttttccggaaggctttggatttgaaagaacagggaaatatttcttctgtgatgaattcctatttgggctatgccgaaattttaatggagcatcatcagtatgaccgggctgtctggatgctgaaagccggaatagaactgtcttaccaacaggctaatgccatctatcgaagtgacctgttgcaggctttatcccgatgttatgaagaagatggtatgctggtagaggcgttgaagtatcataagctctatcagctggaaacagatagcttatataatgcggaaaaggaacgtgccgtgggggagatacgtgcaaaatacgatatggaacggcaggaaaacgagataaaacaaaaccgtctggaattattggaaaaggaaaataagatgcaattgcttatagccggatttatctgtatcttcatagctgcctctttactatattacttatattacagaaaaaataagctgtaccttaccattgtgaagcaaaatcaggacgctatccggcgtgaacagcaattgcagaataaaatagacgagcagtttgcagagataggccgccagtccgctcttttacaagaatatcttacggactcgacgaaaacttctttgccgcaacctgagaaatatgcttcatcctcgttgacagatgaaaagaagcaggatttatttctgcgtttggaaacgctgttgcgggaggagaaggtatttacagacaatttgctgaccaaagagaaagtagcggaaatgttgggaactaatcgtacttatctctctcaaattattaatgagcagaccaagcagacttttactcaatttgtaaatggtttccgcacaaaagaggcagtccgtttactttccgatcctgataaccaaactccgctaaaggcgatttcagctgaattgggctttaattccatgactactttttatagccagtttcaggcggctactggtatgactcccgctcagtatagaaataaagtgcaggaattgcataaaaatagataatctattaatttgctatcataaatttatccaaatgcggcaattgctgtatttggataacctatttttgctataatttaaaactttatgcattaatttgctatcgacgcgatataagctgcaaaactgttttaacaataaaacgggacttaaaaagtgattataaacagtattaatattaaatctatgaagagtatgaaacattcagattaccacggaaagctacttcgactggcgatgtttttcgttgcattgtttttgtgtggaacaatggcatatgcacaaacagaccggatgatcagcggtatagttgtagatgagaatggagatcccctgcctgccgctcacatccgtcaggtgagccagacgaaaggggaggaactagctgctgtcataaccgatatgaacgggcacttccggctgaccctgctccgcacagcgaaagagatagaaatctcttacttgggctatgaatcaaagaaagtaagattgacaagtgcgaacagttacagaattgtcttggagccggcctctgaactgctggacgaggtggtggtaaccggatatcagactatctccagggaacgggctaccggttcatttgcgaaagtagattcgaaaaagttggaaactcaacggttaagtagtgtcagctcattgatggagggaagaatagcaggttatagtgacggtaagatacgtggtgtgacttcgatgaacggacttactactcctctgtatgtgattgatgggtttccggtagagaaaactatttctgacggactgggcaactgggtcgaaaatgtgcctgatttgaatatagaggatatagagaatattacggtattaaaagatgccgcggctacgtctatctatggtgctcgtgctgctaatggtgtagtagtcatcactactaaaaaagccggaaagaatcagctgaatgtatcattttcagcgacattgacagtacgcccttataatttttataccggtcacttggccggtacggctgacatgatagagatggaaaaggagtgggcggccatgaatcctaatcttcaaggagagggagcatcccaatatgcacagaatttgttggacaatgcatccatgtattcctgtttgggggtacaggctattttaaaacatcatacaggtgcgatcagcgaagcacaaatggagcagacgctacatgaactggcttcacagggattccgttattatgatgatgtgaagaaatatggtaaacgaaatccgttttcgcaacaatataacttgaatatcgggcgtggaacggaaaaaaatacatttaatgcttcgctgtcttacaggaataaccgggaagaagataaatatactgacagcgagagtttcggattgaatttgcagaacactacccggcttacttcatggctgagtctggatttgggaacgtatctgaattatggagatggtacaacgcagagttataatctgacctcacccggatataattatgttccttatagttcgttgttgaatggcgatggaagttactatactaacacggctgcggaccggtacagtaagtcacaacaggaaattatttcttcttacggattgtatagtatggatattacccctttggacgaattgggaagaaacttgtcgaagagtaagaattttagtaatcgtacttttgcaagacttaattttaaattcacagactggttgagatacactgcttcgttccaatatgaagtaggggaatataagacaagccaattgcaagataaggaaagctatgctgtgcgtaataaagtaaatacatttgctactgatgcaagtgggagtggccaggctacttataatcttccttatggcaatatttatacaacggggactaatagtattcgtgcttataatttccgtcagcaattggattttaacaagacatttgcagaaaaacatgatgtgaccgctttgtttggtatggaagtacgtgaaaataagacggaatacaataatcggaaatattataattatgatccggctttactaacttatgatcttattgatgaacgggtgctgagtaatacttataccggagttttgggaaactatgtatcattcaataaaaatgatatctccaacatctatgaactggtaaatcgttttgtttctttttatgggaatgcagcttacacgtatgatggtaaatatatggtgacaggaagcattcgttgggatcgtaccaatttgtttgctactggttccaagtatcagaagaaacctatctggtcggtaggtgctggttggaatctggacaaagaatctttttttaaagtttcatttataaatatgatgaaactgcgtttcagttatggtatcggtggtaacatcgccaagaattctgctccttatatgacggcttattataataataatacccatgtgggcggcatacaagggactatcagcaaccgtcctaatcctgatttgcggtgggaaaagacaactacagctaatattggtgtagatttctctatgtttagaaatcgattgaacggttctattgaatattataataagtcgggcgtggatttgttagccaataccaatggagtacctactgaaggttttggtttttctacttataccatgaataatggtaaaatgagaaaccgtggattcgagttgactctttccggtgatgtcattatgggaaaagattggaattggaacgtaggtggtgtgctgggatacaataagaataaagtgacttatgtcaatgtaaaagcacctgctatttttcttcagttcgattatcctgccgcctatccccgtgttggagtgccttataatgccatttatggatatctgtgggcagggctggatagtaaagggcagcctcaggtgtatgactcggaaggaaatatccatgtaagcagttcaccgcaaaaagtggaggatgctgtgtatttaggaacttctgttccggtttatagtggggctgttaataccaatctccgttataagaattgggaactggctgctcaactgctttttgaaggggggcacaaaatgcggaataccaatatagcctatccgggattaggagtgacaagtaaggatgtgagtaaacgttggcgtcagcctggtgatgaggcatataccgatgtaccacgctatgttccgtcagaaagcaaggattataattcttactcatccgatctttatagcaaggcttccattcatgtacttgatgccgataactggcgcttgaagaatctctctgttacttatcatgttcctgcaagtgtatgtcagaagttttatgtaaaaaatgcacgtatcatgctaggtatggaaaatgtgttcactttggctaaaagccgtgatgtgaaatggatgcttgggggatatagtaaaccaaattatttgtgtaatgtcaatttgaacttttaaatgagagcaatatgaaaaagatactatttatgataatgacagtgttggggtggataaatctgacttcttgtaatgattatttggatattgttcccaaagggaacaaaattcctactaccttggctgattttgaagcattgctgcgagatgaatataccattggctatattcctgtaacgaatagtctttatctgttgaatgataaatttgtaggacaaagcagtctgactagcgttacccttacgagtgccaattatctgtggaatgaaacagcggacagaattgtactgaacaatcaggacgaagggacttattaccgtagttatatggctatttccacttgtaatctcttgctggagcatgttcccgttgcaaccgaagcgactgattccgaacgcaatgaggtaatggcttatgccaaagtgattcgtgctatgagctattacatactggccaattattatgctgatacctatgtgtctgcaactgccggtactaaactgagtgtacctttgataaccagtgccgatatcaatgctcctcacaagcaggtcactattcaagaaatctatgatttcatgattaaagatgtgaaagaagccatagaacaaggattacccgaacagtcaaggactgttatccatcccaatttgggagcagcctatgccttcttggcacgggtctatctgcaaatggcgaattatgaagaagcattgaaatacgcggatatggctttggaacagaacgataatctgtatgattggatttcttattacgacactcataaggaagctattacaaaagaagacagttatccgtcgttaccgtcagcgacagggtatgattatgtggagaattactatttccgttgtggagagggtaatcctatctatgctaccagtgaacttaatattccggtggaacgtgcggagagtttcgaggaaggggatgcacgttttttttcccgctggaaactgcgtacggtaaatcaggatacttactatcaaggtttggccaaaggatatttcaacggggctggtctgaccacttgcgaggtatatctcatcaaggccgaatgtttggcacgtcaggtcacaggtaatgatttctctgctgctatggatgtgttgaacaaggtacgtaagacccgtattctgccggagatatatcaacccttgcaggcttcaactttgacagaagccattgacttgatccgacgtacgaaagacaatgaattgattttcactattgtgccattcgctgatgcccggaggtttaatgccgaaggtacttttgcacgtgcactatccaaaacatgggaagggcagacttatacattaaccccggcttcacatctttggattatgcctttcccggcaggtgccgttcagaatccgggtaatggaactatcactcaaaatgtatctaaataacctataaaaacagactttatgaaattgatgtatttattagcaacatccgccgttgttttggtgatgatggcatcttgtacccggcagtcggtaacggggtacacactgacagctgcaattgatggaattcctgacggatcccatgtacagttatttcctgtaagtcatggtcatgaaaaaccggtggcggacactactgttgtagatggaaaatttatatttaaaggggtggcggatgaacctctggctgtacggttgatggtgaaagatgcatacggttccatgcctctgatgttggagaatggcagtataagcgtggagggtaaggtgacttctgaaaaccttaatggaaccgtgaattataatttctcacaggtttcagtgacgggatctcctttgacggacaaatatgtaaaattattgagcacacgtgatgccttggattctatttatgtgacgaataacgagaagtttaaggatatccgtgctgcctatggaaaagcgagagttgccaaagataagatcttgatggattctgtcgttgctacggaagcttacaaagcatctgccgtggccgatagtttgttctttgctacggtagatgccacttactataaattagttatggacaataaagattcttattgggggcctctgatgatgatcagtttgttttcttatcttaccgaagagcagaaaccgtggtatgatgccttgtcagaagaggctaaacattcccgctatggaaaaatggtgaaagagagtgtggctcctgatagtcagatcggttctaaagtgcctgtctttacagccaagtcacaagatgggaaatcggtaactttaaccgatttgtgccaaggtaagaagtatgtccttattgatttttgggcatcatggtgtaatccttgccgtaaggagattcctaatttgaaaaaactctatacgcaatatgcagacaggggtttccagattgtaagtatctctattgacaaaaaagaggcggaatggacaaaagcgctgaaagaagaacaacttcagtggcctaattttttggatactgaaggtattgctgatatatataaagtgaaatttgttcctactatgtatttgatagatgcccaaggggtcatggtaggagaaaatcttcgtggtgaggctttggcaaataaactggctgagctttttggagagattgaataatcatattctttttatggcattctgacataggacggggcggagtcgatgaataagttggatctgtcccgttatcttatgtttcggactgacccttctgttgattcagcccccctgtacaagactatccaggtttattttgattcaaatccttcataagtgtctaatccgcttgcctacagtcgtttattatgaagaatttaaagcacaatccttcatgaatccgtcattttcgggtcaacggtctaaattttaaggctgagccgttttctaactgagccgtcggcataccctgcacaaagcaggataaaaataaagaagctatcgaatattcgataacttctttatttggtagcccgtgggggaatcgaacccccctttcaagaatgaaaatcttgcgtcctaaccgatagacgaacgggccatcctttttatcgaggatttctctctcgattgcgggtgcaaaggtagtgactttttttgaatttgcaaatatttcccaaacttttttctaaactttttgttcatagtccattgaatagactatttacctaaacttaacttttatgaaaactatctttaaatcaatgagttgccttatgctgggcgcaatgattgttacgccgatgtttgcgcaacaaaaagatctttatccggagttggaaggaccgggacctgttgttattatctcaaaagataaaaatggcaaggaggaattaatcaatgtatttgaagaaacgcaacgcccgcatttccatgatccccgtgcccctcgttttttacttactgaccaacagggaaagtttgcattgggtatcggtggttatttgaaaactacaatggaatatgattttaatgggatagtggatgatgttgactttatccctgcactcattccgcaaccgggatccactgctgtccgtaatcagttccagatggatgcaagcacttccactatctttttaaaattggtggggagaaccaagcatttgggcaacttcatcgtttatacagccggaaacttccgtggaagtggaaagacttttgaattacagaatgcttatttatctttcttgggttttaccatggggtatgataccggattgtttatggatcttgccgcagctcctccgactattgattttcaaggacctgacgggatgactttctatcgggccacccagttgcgttatgaagctaatttgattaaaggtttgaaagtgggtgtcggtgtggaaatgccttcagtagacggaactccggcaaaagatgtgagaatcggtaagcagcggatgccggatattcctgcttatgtgcagtattcttgggcgaaagcgagccatatacgtgtgggaggaatcttgagaagtatgacttatgaggatcaagtgaataataaggcaaagtcattgaccggttgggggatacaggcatcgggaacagcaagactgggtaatttccagctttacggacaatatacttatggtaaaggtattgctcaatatttgaatgatatcagtaacttgaatgtagatatcgttcctttggccgacgagtccgggcgcatgcaggtacttcccatgaaaggatggtatgtcggattacagtataatttctcgaaacgggtattcgcatcggctacgtatagccagtcacgcctgtttacggaagattgctatgctcactttaatgaaacccagtataaaaaaggtcagtatctggtcgctaatgtgttttggaatataagccataacctgcaggtgggtgtggaatatctgcatggctggagagagaattttaatgatgtgaaccgtgaggcaaaccgtataaacttgagtgcacaatataatttctaacttattctctgtatctttgtgtctgtcaataatggaaagagaatgaaaaaaataggtgcacatgtatccgtaagcgggggcgtagaaatggcccccgttaatgcattagggataggagcggacgcattcgctctttttacaaagaatcagcggcaatgggttgcaaaacctttgtctgtcgagagtattactctgtttaaagaaaactgtgagaaagaaggttttgatatccggtatattcttcctcatgacagttatctgataaacttgggacatcctgatagggaggggatggaaaagagtcgtgcggcattcttggatgaaatgcggcggattgaaaatgctgaattttcatcccggaagtcatttgaacaagatatcaatagagaagtgcctggacaggattgccgagtctgtcaatatgactttggataagacgaccggtgtgactgctgtgattgagaatacagccggacagggaagtaatgtgggaaatgaattctggcatttgagatatattatagataaggtggaggataaatctcgtgtgggagtctgtctggatacttgccatacctataccgccggttatgatattgcgaatgaatatgactgggtctttaccgagtttgatgaagtcgtggggggaaactatttgtgtgccattcacttgaatgactcaaagaaaccattgggcagccgggtagaccgtcatgacagtatcggaaaggggctgattggtattgatttctttcgccgtttcatgcaggattcccgttttaacgatatgcctgttattcttgaaactcccgatgataccatttggagggatgaaattaaaatgcttcgcagctttgaattatagcctgtgctttgagtgagatgtggtgatgcttttaatagtaaacctgtaggtgggaatgatttgtgttttcatgtgtatggttaagccttttttattttatgtctaaacctgattgaacgcattatttctatctccatagtctttggagttaactcccaagcttatggagataactccaaaggctatggagttaactccgcaagcttgggagatagaagttatcagtaaaagaatctttaacctgaaggatacaactgtttagtttgccgtagtttataggataatatatcctttccgtatccttcagttattttataccctgattacatgtcttttatttcatccaggttcttctggatatcttcgtcttttaactcataattcatcaagttacctgccagatattggtcgtatgaggccatatcaatcagtccgtgacctgaaaggttgaacaggatcactttttcttcgccggattctttgcattgattcgcttcgcgtatggcagcagcgatggcatggcacgattcgggagccggaatgattccttctgcttgtgcgaacaaacaaccagcctggaaggattctaattgctggatatcaacagcttccatcaaattatctttcaataattgtgaaacgatgacacctgcaccgtgataacggagacctcccgcatggatattggccggagagaaattatgccccagtgtaaacatgggcagcagcggggtatatccggcttcgtcgccaaagtcatactggaatttaccacgggtcagtttcggacacgaagccggttcggcagcaatgtatcgggtttgttttccattcaggatagtgtggcgcataaaggggaaacagattcctccaaaattggaaccaccaccaaagcaaccgataatcatgtcgggatattcgcctgccatttccatttgcttttcggcttccagaccgataaccgtttgatgcagtgtgacatggcttaataccgaccctagtgtatatttacagttgggagtgctcattgccagttcgatagcttcggagatggctgttcccagtgaaccttgataattgggattacgggtaatgatatccttgccagcacgggtagacatggatggagaggcggtgaccgttgctccgaatgtctgcatgatgctgcggcgatagggtttttgattatagctgatttttacttgataaacggcagcttccagtccgaatacctttgcggcatacgatagagcagcgccccattgtccggcaccggtttctgtcgtgacattggttacaccttcttctttgcaataatatgcctgggccagagccgagttcagtttgtgggagccgatggggctgacactttcatttttgaaataaatatgtgcgggagtccctagtgctttttccagtccgtaggcacgtaccaatggtgtgctgcgatagtatttgtacatttcacgcactgcttcagggatttcaatccatgcgtctgtctggtttaattcctgtttgcaaagttctttggcaaaaatggggtagaggtcttccggtttcagcgcttctttggttttgggattcaacggcggcatgggtttggtcttcatgtctgcctgtatgttgtaccagtatttaggaatttcatcctctggtaagataaaacgtttctgttttgtgctcataatctttcaatttaatagttttgcggtcaaaattaggtaaaaaaagtattccttactaattttcaactacttttttgtcgggaacaataaaaaaaggggctgtcagagtaaaaatgcgaagttatttgttattatagacagagatgtgaatattttgattaagtttgttttctgttaatgcaagataatatcgacatggaacctttacacaaactatttatttatcgtaagaagttagtaaaaccgtacatagagcgattgctgaaatggatggacgggataacttatatgatgtcggctttgttaatccttacattggtttatgagcatggatttcttatttcttttgaagaaatggaggtgataaacatgctgtatcattttgtctggattgtttttctggttgatatttccctgcatcttttattaaattactcggacacgaagcggaagtaccggggactggcgtggatactgagtctgatgctttatctgactttgattccggttattttccatgaaccggaggtgcaagggggaattcatgatttctggtcttttttccacagccgtttatatcatgtggtgctgctcactttgctttcactgttgcaattgtctaatgggatagtccggctgctgggcaggcgcaccaatccatctttgatctttgcatctagttttctcatatttattctgataggggcggcgttactgatgcttccgcgtgccacttatcatggtatttcttttatcgatgctctgtttaccgctaccagtgccacttgtgtcacggggttggtctcggtcgatgtttcttctacattcacgcccgaggggttgttcatcattatcatgttgatacaaatcggcggtttgggagtcatgactctgaccagtttctttgctatgttttttatggggaatacttcgctctacaatcagctggtggtccgtgatatggtaagctcgcagtcactcagttcgctactttccaccttattatatatattaggatttacattggcgatagaggctgcagggatgggggttatttttttaagtatacatggcactatgggtatggatattgaagaggaattggctttttctgctttccattccatctctgccttttgcaatgctggattctctactttgtatggaaacttaggtaacgaactggtacttcataatcataacttgctatatatcactatctctttcctgattattttgggaggtataggtttcccgatactggtaaatctgtatgagacggtttcttatgaaagcaagcgcttgtatcaccgttatgtcaaaaagaataagaggacaatccgtaaaatacatttatataacctgaatacccgtattgtattgattatgacggctatcttgctagtgacgggtactgtggccattgttattttcgaatggaatcatgcttttgcgggaatgacggttacagagaaatgggtgcagggcttctttaatgcgacttgtccccgtacggcaggattttcaagtgtgggcatgactactttcagtgtgcagacgttgctgctgatggtggtgctgatgatgattggcggcggtacgcagtctacggccggtggtgtgaaggtgaatgtgtttgctgtagtcatgttgaacttgcgtgctattcttataggtgccgataaagttaatattttcaacagggagttatctcatgattccatccggcgttctaatgccacattgattctttatctgctgattgtttttgcgggtatctttagtttaagcattctagagccgcaggcttcagtgatggcgttggtttttgagtgtacttcggcactcagtacggtaggttcaagcctggatctgacacctactttgggaagtgacagcaaactgattgtcattgttctgatgtttatcggacgagtaggggtgcttactttgatatccagccttattaaacagaaaaaaataacgaaatataaatatccgagtgataacatcataatcaactagttatgaaatacattattattggtttaggaaattacggcggtgtgttggccgaagagctttccgtattgggacatgaggtgataggagtggatacaaacgagcatcgtgtggatgtgttgaaggacaaaatcgcgacttcttttattattgatgctacggacgaacaatcgctcagtgtgctgccactgaaagatgtggatgtggttattgttgctatcggcgagaattttggtgcttctgtgcgtgtggtggcactgctgaaaaagaaaggagtgaaacatatctatgcccgtgcggtagatgatgtgcataagaccgtgcttgaggcttttaatttagatagtattctgacgccggagaaagaagcggcacgcagtttggtccggttattggatttacacgtcaatgtggagtcttttcagattgacgaggaacattatgtgatgaagttcaaacttccttcttgttttgtaggctataaggtgagtgatctgtcattagaaacggaattcaatatgaaaatcattgcattgataaaaggggagcaagtgctgaatggtttgggtatctcgatattggagcatcaggtggagaatcattttgaggaaaattatgagttggaagaagaagatcagttggtctgctatgggctttataagaattttatggatttttggaaggcgttgtagtaggaatgcctttcaaagaaagaatattttttttctaagtgagattaaaccttttcttttgggtttagtctaatttaataaataatttagtttagtttttagttttctctgaaggccggccaatgtgatattgcccggttttcgctttttatagaggttttcttgtgagtgtccgttactttttgttactttgtcacctagaaatcgagatttagatgaaacagatatattttttatttgtcgttttactggttgtaatggccgcttgcggaggtaagaaagagacttccgttgatgcagaacaattgatgttccagatagacagtgtggatcatgtgacaggtttgcagcgtatgcaggtttcacgtattgaccagcatattgtcagtggcggaaaaaaatataatttgtttatagagcgtgctcccagtgattccctgccttcagtcaaaagtgatttggggatttttgccgataatcgtatcgtcgttagaatttcccgtgaaaatgggagtcgggtctttgccaaaacttttaccaagcaaagtttctcaggattcgtaagtgctgatcatctccgtcattttatattggagggcgtggtatttgatgaagagaagacccgtgagggaaaaaatatcatattggctgccagtgtgagttatcctcagacagatttgtatattcctttctctatcactattactcctgaaggaaaaatgagcatatctaaaaatgaggatatggaggagcttcctcctatgttgggagacagccttaattaaatctaaaatacaggaataatttttcgcgtcataatctttttaggcggttagttgttggtatggcattaactaactaaagaataaattagattatgagaaagattttatttttaatggctatgctggtatgctctcttcagttcgccatggcgggcgatgtcgtgacccgcgatgtgaataagcttcctgttgccgcacgtgaaatgattggcaaacatttctctcagactaaagttgcgtatatcaagattgaaaaggacttgtttcagagcacttcctatgatgtaaaattggccgatggcattgaattggagttcaattcaaagggagagtggcttgagatagattgcaagaacaaggcggttccttctacttttatccctcaggctatttctaaatatatgaaggctaattataacgggcataaaacggtgaagatagaacgtaaccgcaagggatatgaactgacattggaaaatgggttggaagtagactttgatcagtttggaggattcttgaagttgagcgattaaaaaagattttttctgtaataggggaactatctctcattatagtaatgatgccataagagggtgtatcaggaacaaattgaactatctttttattatcagcattgaaaatgatggtcgcaacgagttctgattcacccttttatgtattataaatacagttctcggtcttttccctgttattaatccatcggctcgtaatcctttgccagaccaccttcgctggtttctttatataaggaaggaagatcatggccggtctgtttcattacttccaccactttgtcaaaggatacacggtgattaccgtctgtaaaggcagaatagatattggcgtcaagagctcgggctgccgcataggcatttctttcgatacaagggatttgtaccaatccgcataccggatcgcaagtcattcccaagtgatgctccaagcccatttcggctgcatactctatctgggccgggctacctccgaataattggctggcagcggcggatgccattgaacaggccactcctacttctgcctggcaaccggcttcggctccggaaatggaggcgttgtgttttactatatttcctatcaatccggcagtagccagtgctcttaaaatccgcatatcgctgaagtcacggcttttttgcaagtgataaagtacagccggaaccactccgcatgatccgcaagtaggggctgtgacgattttgccacctgaggcgttttcttcactgactgccagagcgtatgagaagactaacccgcgggaacgcagattgtccttataaccttttgccttaatataataggtggaggcttttctgcgcagattaagtgggccgggtaatacgccttcttgatccaaaccacgctcaatggcttctctcatggttttccatacttctgccagatagtcccaaatgtctttgtcttcacattgctggacgtattcccagtaattgcgcccggtacgttcacaccagtagaggatttcactcatacggttcatatcatagatttccggagttgagcctttgtcgtgcccttcttcggctagagcacctccgcctacactgaaaacagtccattcatctgtcacttttcctttttcattcaaagatttgaaagtcatcccattgggatgaaacggatagaagacatgggctttccagataatttctgtaggcgcatgcggttgcaatgtatctaaaatggctacatcggtcatgtgtcctttaccggtagcggcgaggcttccataaagagtaacttgaaaagctttggcttcgggatgttttcctaagaagatttcagcagccttgcgcggtcccatagtatgactgctggacggaccggtgccgatgcggtatagttctcggatagatttcatttcgttttataaggttagttattatgaggaacaaaggtataaaataaaaggaggaaactagcaaaaaaggaaaagaaaaactctcttgacaaataggaaagttgtcaggagagtttggaaaaccaccggtaggatttggtgtattgtctttattctaattgtctttgtatacctttgtcaccaacgacaaaatactgattattttcaatcagcatggcacgtccgcgctttttttcccggttttctttattgtctacatttactccgataacctttccgttatagaaagtggaaatatctttgaaaatggtatgtcccacaataatgtgttttgccttataacggtccataagcatttctagggagtcttttaccagcggattgtatttgacatcggtgcgtaccagtccgcgataccagatgggcccgctgtttccatacaggaaggctgtgagtggagaaagcgctttacgttcttttttcgtcataaatagtcctttgctcatttcttcattgacagtggggatgctcaagttcttgtcatagaagtctttgcctagtccggcatgcacatataggtcgttacctatcatttgcatggtgttacgggttcccaaccatctgcccagttcggtatcaggaccgaatagccgggagtacttcatctttagtttttcagccaatattttatatttttctttggtgtatcggaggtcattggccagtaccatcggttcatgatttcccagcatgaacgatacgtgtcctccggctttggctgcttcctcttccagtttgtagaatagccagaagatttgcggtacatcttttcctctgtcaaaaatatcaccgataatcatcagatggtttttcccgaagctccatttgtagtctttatcaatgatatggttgccttgtaacaggctgattacacagtccagccttccatgagggtcggacatgacaaaaactttgtctgcctgaggataattccatccgggacgttttaccgggtgtagttttacatcaaatggaaacctgcctttgtggtctgtcacatgcagggtaaagttttgaggtaatgtggtataagtggtatcaatgatattccctttcttatctacattgattactctggtttggccgtcaggctgatacagtacgtatggaccatcggctgttaactcttcttttttctctttgtctttctttttgtctttgaaatcaagagttccggcagtaaggtcggaactgatgaatgcgagggtaaatgcaagaagaaagtagttgataaaattagtcttgcttgtcatcgatttgatttaatattaaaattataaatttattataggacatctattaataatgttcagtaatggggccttctctatcatctatttcttctatattgcttgttccttctataatatctccagttgcaaaatattttgagaagctgaattttatatctggattatttttatttattagttctacataaagatggataagtaaatcatccttttttattgggtaatgtgcatgaaaatgtttatcactggaatccccttctagaatatcagtgctaaagctggaacctcccccataatacttcatttcatttatatagccaaaaggaggggcagatgcataactgtttgatttgaaaagtaaattagctttggaatacaccctatattcttgagaaacaacaggattaacaagaatttcgtaatctcctacttcatattcataagtaaaatatccggcatcataatacattccgatttctccttcgacatttctgattatttgaggagatttttttagattccacacaccaaggggaaagttataaatgggtacatcattattgttgtttgtggttcctgctactggaaatgacgaaatacttccccaaccagttgttgtttgttcactttcaaattgcatttgtgtatttgtattgatttttagatcaatttgtccaattgaaggcttacttttgttgatgccaataatggaacctgctagaccttttaaagcacttacagctgcagagcctcctgacgtaactaatgcttttaacccgtttttaatgccactaacagttgcacctttaatactgtttccaatacttttccaaaaagaatctttcttagttattccgttttcaatttctttactgactgtattaataaacccttcttgattaactgcaatagaagtttttgaattattgaatgtattggcaagattgaaattgaagttagaaatattagtggtgttcattacgatagtacctgtgatatctccacttgtttgagccatacctgtagtttttattttattaacagcccaacctctaatttcgaaattagctaagctttgtgtattaagactaggatcataagcacactctatttctaatccataccaattgtttgctttatatccagagctaacaaactcgtttcctaaaaatgtaccttctgtacttgctatatatgaagatttttctgaacgatttatgggtatagaaatttcttccataaagttgaatagactggtagttttgtctgtacggattccccaaaaggcctctgaactacctaagcctgctgatgaagctatttcataaaagaaaaaacggagtaatcctgtatatttgtggtataaagcaaaatattttgtaggagtactttcggttatattgctataaatgagttcccagccattttctctagaataatatcgatttgcatatattggatcagaagcattctcgtctaaccatgttgaaggaattcctagattattgctgctaccttttttccatggaattcccatggtagttatggtatgtgtaaatgggtttatagtttcaatgtcatttatacggtcccaatcaaagtaattatcaaaagcagaacgattacttggtggattattggggtgggtggttattatgtcattggtaaaggtgtcatcacaactattaaataaacatgaagcaaagatgaataataataaggattttctcatatctttatgtattttatatagttaatttctctttaagttagggagtgataatactccctaacttaaagagaaggatttattgatttggattttatcaatttatgttgactattatttcagatattctggtgtttgtacaatattagaattagcattaatttctttttgaggaataggtaatattgtacgataatagtttctgtcgaaatccatagatgttttttcgtcagcgaaatgcactacctctttcatcatatcgtctgtttcgttaatacgagttactcgtaagttattacgtaataagtcaaacatgcggtgcccttcaccaatgagttctttcctgcgttcttctagaacatcatcaagggtaacctttgcgggcatcgtatagtccggatttcctcggagtgcgatggctttcaggtattttgcagcttttgttgcatctccgtttttcacggctgcttcggctgcatttaagtaagtttcggaaagacgtactataggaatattggcatccataatattttctccaggttgtggttgatacttattcaaatacattacttttttgtcttgattaactaataacttaatgcgtacatcattaggcgtttctaacagatggtgataaaaactgactgtaatgcacatatcttgatatccttttggagaagttagatatcccatactttcattgccggggctttcggtagtagtattgactatttcgaagagaatttctcccggatttgcttcggaggcttccgtaccccatacagtgggatattcttcggtattccataattggtatttattggcttccgatccttttattgcttcttctgcagcttgtaaagcttcactgttcttccccatatacagatatgcccgacttaacaaagttaatgtgccccatttactgattttacctttcttatttaaggataaatctttttgattcaaactagtacctgaccatgaatatgtgggtatcattaaactagccgcattctttaagtctttgattatttgatcataacattcagctacagtgttacgtgaaggcttactgtcggcagtggctgatgctgaagtgatgataggtactcctaaagaggctccgttatcttttaaataagtatatccgaagaagcgcgtaaggtcaaaaagggccagaccacgtattgctaatgcttgtccttccaaatcattgcggaagatatgctcatcttcatcgtttggaagaatttcgatattgtcaatgccgtctaaaattacattacagttttgaatgatggaataaagatatgaccagtgtgtacttggtccatttgcaggtaaccaatccatttggtaatagtgagctgttctacaagttgattgtacagcttgcatgtcatctcctgttacatctccgtagtagattaaacgcccggaatacgcataggcattacgcattgtcgcataaatggcgtttagtgaataatcaatgtcggagagagatttgatactcgtttctgttggaatttgtgtggacggttctaaatccaaccaatcgtttccacatgaagtaaacaatccgatggataagactattgataaaaaattatgtaatgttctcatattgttgttttttagtggttaaaaattgatgttgaaaccaaaagtaacggtttttaaaggcggtgtggtttgagttgcactaccggcactaacagcttcaggatcataattgtcataggccgcccatgtccataaattgcttgctgatgcataaaaacgaacatttcctatattgattttatttgtccattctttaggtaacgtaatgccgaatgtgatattttttaagcggaaataatcagtactgtggatacggcggctacttgttattttatgcattgatacagaagatgatttacccagcatatatacttctatattggtttgatcacctggctttttccagctatcacgataataagtcggaatgtttgcataggaatcgtaaccgccatgttctgtcttttgtgcccaagtatcataagaatatcctccgaattgataggagaataagaaatttaaatcaagccatttataacgcaatgaattagagatacctccgttaacagttggttctgcatgtttataaggaatgaattgtgcatttttagagttctcggtaatttcttttatataatttccgttctcatccaattcattggtatagaatagaggatttcctgtttcaggattgatgcccgcaaattcttgtacatagaatgtacgataagaacttcctactttgtgtatttgggttccactgacaatttgtgtctgttcgccatctaattttacaactttattggagttatgacctaaattgaaagttgtattccagctaaagtcttttattttaatattagtggaattaatagttaattcaatacctttatttttcacttcacctatattcattaaataactactaaatcctgttgtcatggatacaggacagtccattaataagtttttagttgtacgggtataatattcaatcgtgaagttcagacgatcccaaaaaccaaaatccaagccaatattcatattataattggtttcccatttcagattaggatttgcaatttgggacatttgaataccgggttgctccaagtaaccaccactaatggagcttaatcccatatagccgaaataatcagaaggaagagtaccgtttacaccgtatgatgctcttatacgcaagtctgtcaaccaatcttttacaggttgcataaattcttcttcaatagtacgccatgctccggatacagaccaaaatgttccccaacgattgtcacggtgcaaacgtgaactgccatcaacacgaaaactagctcctagataatatttatttttgtaatcgtaattcaaacggcttaaataggataccagtctgtaccttgaatcacttccccctacagatactgttttcattccattactaatggcatgtttgtcgggagttgtaaaattgtaagcttcccctgataaatagtcattgtaggtatcatcaatttcatatccggcaagaaagtccaaatgatgaatgttgttgaaagtagttaaatagcttaaggtgttactccataccatttttttatattctcttatgcgttttactacttctccattttcatcttcaccgttggaagtacgtgggtcataccatttctcaccttttacagtagtgtaatcataactgaatgttgttttgaatttcagattttttatgatttcgtattcggcataaagcgtattgaatgcgcgtagcattttttcatgtttataatcgtattcagctgataatttggggttgcggtcattggctttacgaataaatttacgattccaactgccatcttcattgtagaccggatctgaaggagtagcccaattacgtgaggaatagaaaggagatgtataagtgaatccttcgtcataaacactctgatttacatttgagaaaagtatcttggcgcctacagtcaatttgtctgttgcactgaaatctgcgttcaaacgccctgttacacgttccaaaccggaaccttgtacaataccgttctgcttcatatatgataaagaagagtaatatttaaatttatcgctgccaccggctagtgatgcttcataggtagaatgatgtcccttttggaaaagctctttattccagtctgtgaaaccacaccatggaattggagcatatttatcgatttgcccatctgcataagttttactttgtgacattagctcttcctctgatatattaggatttttatcagctagtttacgttgttgatataatatcaatccattgtaaatatattcacgtcgttcttctccccccataactgggcgataatccattgcgaaatcattgctaccccagtctgcttttaatgaaatttgtgcttttccgctttttcctttcttggtggagattaaaataactccatttgcagcacgtgaaccataaagggaggctgctgcagcatcttttattactgtaatattttcaatatccgagttgtttaatgtagacattatgtcaaatccggagtcggagctggtagcagcaacagaaccggattggacgggaacaccatcgattacgtatagtggagaattgcttgcattgaaagaacccataccacgaatacggatagaagtggaggcaccaggctgacctgaactggaagtgacttgtactccgggagcattaccttctagcaaactggagaatgaaactacgggtaaatcttttaattctcctgtcttcacagtagaagcagaacctgcgtatgccgatttcttgaaagtaccataaccggtaacaaccacttcttccataacattattatcaggagccatgactactttcagtgtctttccggcagtggctttaatttcctgcttgccataacctatataggagataatcaaagtggcaggtatacggtctacatctaatgagaagtgcccgtccaaatctgtagtagttccattcgtagtacctttgactaagatattcgctccaataataggttctcccgtctcatccaatactgtaccggttaatgttgttttctgttgaggaacagcagactcttttttttcaatttgcttgatagcaataacaccgttgtgaactgaataggtcaaaccactattcataagacatttatcaagcacattggctattttttcgttatttacatttaggttttggacttttatttgttttacatcattggtgctgtacacaaaagtaaagtcggtttgtctttggatttcccaaagaatttcactcaacgtggcattcttgaatgaggctgtgacagtggcttgtgcaaacactttgttggctgcctgcataaaacctgtggtaatgatacagaaaaataggaacgtaatccacaaacgtttactacttttaccgtgattggtgtagttgtgttttttgtccataatacatcatttttattagttatagaatgtgattgttttgttattgacttttacgtgtactttttgagtctcttccaacaaacgtacaaatggagtgatttccgaataccgatctacattgcatccgaagcgtaggtcttttattttctcattggcaaaaattacttccatatcataccagcgtgatagtattttcatgatatcttccaatcgctggtctttgaaatgaatttttccttttatccatgaggtataaaatccggcatctaccatgcgtatctgtatgctgctgtttccaaggctgatggtagcttgctgggagggctttaaaatacagctttctcctgtttctgtatttactttgacagaaccgtttaccaaagttgtctgatactcttcctgtggataagcagagatgttgaatgtggttcccaacacttctacttgcatgccttgagtgcatactataaatggttgccctgttttgcagacttcaaaataggcctcgccttccagttccactttgcgtggaccgttatcaaatgtcacaggaaagcggagactggtcattgcgttcagatgcacttttgttccatcacttaacaatagagcatattctccacctcgtggagtttccactttattatatacaggcttgttttttttagctgtttttgatgttacttggtaattcagcattgtagagtccatgtggactcgggctccgtctattttctcaagcagactctctgtttctttatttatatggattgtctggccgtcctccaatgtcagaatagcttgggattccccaggtagaatggattgtgcgatgaactgtttgtccgaaagagaaacgggcgaggtgaatttcatggaaatacttacaaaaaggacaggtaacagaatgattgcggcataacttactattttgatatatctgcttctgttattatttcttttgattcgtttttccacttctttccatccggatgaaggattgaatgccgttttttgccggaaatgctgcttttggttttcttcatcacaaattttcttgaataaaatctcgtgcgctgtagattcttctctccaagtagttagttttattgtttcttccggggttatttcttccgacagataccttgctatgaggttggctatatagaaatcttgttttatcatattttgacctgttttttatctcttttataataaaacaagtctgtttgaaatttgggtgaataataaaacgacttttttgaaaaaaaacaaattaatgtctttttatataaagaacaagaggaagtaatagtagtctttcaagttctctctgagtttcttgtaggctattttctttaatgtatggactgtttctgtagatatgtttagtctgtctgctatttctgcattttttttcccttccagagctagttgcataatggctttcatttggtcgggtaatttatctatggcttcagaaacgatacgataagtttcctcttcaacgattgcatcgtgaaaaaaggaatcctttttcttttcgatgacattttgagcgtattcatatactacttttgaatgctccagttcgttgagtgctttattgcgtacagctgtatataaaaatgcttttacttggtgcagataaaaaaaatcttctcttatttgccatagtttggcaaatgaatcttgtacaatatctgctgaagtttcttgattttctgtatattgattggcaaataagcatagagttacataatatttattgaaaatatcatgaaacccttgctcattgagcttaatacttatagttgtatgagaagttccagctgccacctttgcttttaattttctctaattttagtgcgaatatagagaaaattaattaaaaacagcctcttattctattaaaatattattttagatttttatcggtttgacttaaccgattgaagaataaacttttagcgaattatttgagaaatagaggtaacgatttggcaactgtgcgaatttcagcgttttgcgttgctatgctgtcaaataaacccttctaaatgcaaagttagaacaaatattcaaaactacaatgttccaatcaaaaaactatatgcattcaatgtcaatttgataagtatcatcaatcagaatatggttatagtgtcgtaacacacattgttccaagttatactcgtttgtttttattatctcgtctaagattacatcagaagacaatcgtttctctattactttttcaaatcgaagaatatcatccaaatgagtttctatatattttttactgaatattaaacagatatacttgatttgtcgcaaatcttcaagggagaaatctttttcccaaccaaacggaatatagcagccctccacaatctggttctgagaattttcaatacaggtctttatcatttcccgaacaatcggccacagatattccgtcagttctgcatcactgctatcagcggaaagaccacactgcccgctcctaataagtcccattttcagatggtctattgacagatagggatatttgtatttctccaacagtctttgtgcaagcaaggtttttcccgtatgcgtgtcaccagcaatcaaaataatcataactaatatagc

SEQ ID NO: 162 - DNA, 212210 bp, Phocaeicola dorei
  source 1..212210: mol_type = genomic DNA
aattaatttatagtgtgattatagatctgtacatttattttttctatttataataatgcttatatctttttggattgctttcttggctattgcattggtattgggagtctataggacaagcttttgttattgtgcattgattatatctcgtatattaattcctgaatgtgtacgtcttaccccaataatagatataagtttgaatacgggaattatttgtattcttattgtgttaatcatacgggatttatttttgaagcgagtagtattacagaatgctttgagtgatttctatgtaaaaagactattgattgtccttctatgttttggatttgttttatttctttcatgttatgacaatttatcttttcaaataaaaatgctaaaccaatttgctgtagctgaagtgctccctgctattttaatggttgtttcattgagaaatgaaaaagattttaaaataatactatggacattttttgtgtctacattgatttgttgtgtttatgccatatatacattaataatagatagaaatccttatgttggcgttattaatctattatattctaagcgagattttgtcttgactttaggagaggaattggattattctcgtggctttgctggtacttcttccacttttgaatttgctaatggatttggttattttattcctgtaacattcagtttgatgttttttttctatcagataaaaaaaacaatgttaaagttgatactacttttattgttgtctatatgtgtcattatttgtacgaaaaggtctgccattgttgcttatgtcgttttttggataatttattggctttatagttcaagaaaacaaaagaagaaaattttacttttttttgtttctatgatttttgttgcaatcttcctaatatatagtattccacaattaagtagcgttcaaggcttgttggagagttctatttttttttggaatgatgatatgaaaataaagaatgatattcatggctcttcgtttagcatgagagttgaacaggtattatatccattcgttttagtagctgataattttttatttggaaaaggttttggatggcatacgtattatttatcagaacatgaactccatccagttttacaaggatttgaatcaataataactgttgcaatctctgatggtggcttttgtggacttatattatggtcttatttattctatatatcatataaatatagctcattaaaagataagaagaaaaaatattataagatttttacttttgtgcaattaacaatagctatagctacgggattcagttatttctttttttatggaatgtatattgttttattaaatagattttatttgctaagagataaaggacaatgaaagtaagtatagtgacagttgtgtttaatagtgtgtctgtaattgaagagactatattgagtgttatatatcagaagaatgcaagtcttgaatacattgtaattgatggcaacagtactgatggaactcaaaacattatatctaaatatatacaccatattaatgtttttattagtgaacctgataaaggaatttttgatgcaatgaataagtctttgaaatatgtaacaggtgaatatgtgatatttttaaatgctggcgataaatttgtaaataatcatgtcttaagtgatgtttttcaaaattgacactgtccaaaattttgtgtaaatggaaacaggattcagctgtaagtttgttcttatatctggattctgttttcaaaaataagcataaattgattcataatcaagccccagttatgaatcggctgtgtccatttcttctcaatctccataagtgaaagataaacggtctttttgactgcatcatccgaagggaatgaaagctttgatttcgtgtactttctgatttttccgttcaggttttcaatgagattggttgtgtagattatttttctgatttccagcgggaactggaagaaaacagtcaaatcatcccagttgtttctccatgaaagtatagcataaggatactttcctccccatttcttttccagattgtcaagttctgtggctgcaacctctttgttgggtgcattatagatattcttcatatctgccgtaaactctttcttatctttataaaccacatatttacaggagtttctgatctgatgtaccacacagatttgagtggatgactgagggaatatactgcggatagtatccgtaaatccattcagattgtcagtacaggtaatcaggatatcctgcaccccacgggcttttaaatcagtcaggacacccatccagaaagaagagctttccgatttgccaacccacatgccaaggacttccttcagaccgttctgtttcagtccgacgcaaaggtaaacggtcttgtttatgatcttaccgttatcccgtaccttgaagacaataccatccatccagactatcaggtaaacaggatcaaggggacggttctgccactcctgggcagcctgattgaccttgttggtaatgatggaaatggcagatgtagagagctctatttcataaatctcacgcatctcttcctctatgtcagaaacgctcattcctttggcatatagggagataacgagcttttctatagaaagtccacggctttcatgtttaggcactgctatcggctcaaactggccgttacggtcacgtggaatagaaatgacagactctccatgttcggtttggattttcttcggataactgccatttcgggagttgccagtgttatttcctatcacagaattcttttcatatcccaaatgggcatccatttcaccttcaagcatcttttccaatacttgggcatgcaactgcttcagaaacttgctcacatcggcttctgtcttgaactgactgataaacttgcttaaaacctcatcaggcactacttgattcttttctttcataagcttcttcattttgcaaatgtataaaataaaaaatacgagactcatttctgaatcccgtatttccatttacacaaaatattttatagtgcctcaaaattataattttgatgatgaattaatttacggtgatacatattttgaaaatgaattaggatttattcttcaaaaatctaatgctatttatgtccataatccaacaaaaaaagatttgatatttaaatcacaaggattttgccatcaatcacttttcacaaaagcttctagattgaaagaaattttgtttaatttagactatcctattggtgcagattatgatacaacagcgagaatttattttacaggtaatcgtaaaatacgatatgtgaagcaggctatatctgtgttcgatgatcgttttggaggagcttcacataataaaataggtgtggtgttagacgagagatatataatgtttgattacaaaaaccgctatgactttttgttgagaaaatatttgtatatatataaattatatattaaaaatattctgcactatctgtttcctaatatggtgaaaaaatatcgacaaagaaaatatataaataaattacctgaataatatgcctttagtatctattataatgcctgtttataatacaggaaatgtattacattctacaattaaaagtgttttaatgcaaacatttacggatttcgaacttcttttgatagatgacggttctcaagacggtagttctgaaatatgtgattattatgctcaaaaggatccaagggtattagtatttcataaaataaatggagggatatgtgatgctagaaattatggcataacaaggacatgtggaaaatatattgccttttgtgatcatgatgatgaatatcttccttttttattagaaaaatcaatagagatatttgagaaaacagatagtgacttactgcattatcgatatagaaattattcggatttacagaaagattgtatatttgaattgcctatattaaataaagatatatggaatataacgaatctttctattttgcataataaattagagtatctgcattatttttcaacggtgtggtctattatatataaagctgatttaattaaaagtaataaaattagatttaatacaaaattaaaacatggcggtgaggatcttgaatttaatttaatggtaatgaaatatgcatcaaggatgattgttattcctgatattctatatattcatagaattcgtgaatctttgtcaacatcagcaaaatattatgaggatttactcttttattatcacatttcccaaaagttagataatgatattattacccaaaaaggtattaattgtaaagatgaatattatactcttaatttaactcatcgtttaataagttttatttctctagcgtctattgtaggaaaacaatataaagagataaggtatggatttgtgatattcgaagatttggacttatctactactattgtgaaaaagtacaattggattaatccacgaataacattgatttatatattattcaaatttaaattatatctattattatacattctttttaaatatagaaataggaaacgaagaaaaaagcataaacgatataattcttgatgggcgaaataatgatattttaatttgatgttaaattaatgttgtgcaatttacttaaaaaactttattgaatgatttgtctttattatggaccaataacttcaaaaggacagttaagcattggtggttatgaagctgctaatagaaagaatatagacaagttaaggagtttaggaattcaggtaaaagaatatcctaatcctgttattaataaaaaacttggttgttttggaaaaatagtttatataaaacttttaagctcagctatgaacttactaaagtataaaaagcggagtgatgtagttgtacatataacgccactatataactatcttctttttccatcagtgtttactatttggctggctaaactttgcaggttgccaagtgtcttggatttacgtgcaggttcttttatttactattatgagcataagggatattggtataagaaactggtaaaaagtattcttaataattctacaattataactgtagaaggaactccttatttaaagcaaataccgatgttaactggtatagacaaagaaatggtttattttcctaacattgcctgcaatattaaattaaaatatgctccacgtaaaggaaatacggtaaacatattctattttggacgtattacaagtacaaaaggacttgatgttgttattgatgcaatcaaggagctggatgaaaaatttgtgctgtatttagcggggaaaatagctggtgatataaatgcagatgagttaaagcatgaaagaattatttatttaggaatattgtctgcagaacagttgaaagagcaaatgcaaaatatgcatttttttatattcccaacaaggcatagaggagaaggacaaagtaattctcttattgaagctatggctaatggattaattcctatagtaagtgaacagggatttaatagagaagtggttggggattgtggagttataatgccacatacttcaaaagggaaggattatgcaaatgtaattagggaattgtcgaaaaaagatatagttgagatggcaaagaaatgtcagcaacatattcattcctgtcataatatagatattgagattcctaagttagttgaactttataatagaattttatgtcattgattttttgtggagacttaacacttccttttggaataaatatagatatagaagatataaaaccgttatttgcaaatcatgaagctattgctaatttagaaggtagtatccaatttgatgaaaagaggttgaggtcttacaaatggaatgataaattttcgctttatagctgtccaaaagttattgatataattcatgcgttgaatatccgctacgtttctctttgtaataatcatgttttagattataaacatcctattgaagaaacagaggcatatctaaaatctagaaacatatgtccttttggattgaaaaatcatgatgtcctagttgcgaatcttaatggtgttcctttgtatattgtaacatttgcaacatttgctacagaacatagtcttcatttatttaatccggattatgtgattaaagatattcaaactttgaaaaagagagattctaattgcttgattgctgtttatccacattggggaattgaaaagtttcgttatcctgagccggccgatcgtaatcttgcacacagaataatagatgcaggggcagatattatagtggggcatcatccacatattattcagcctatagagatatataagggaaagtatattatatatagtattgggaattttattcttccacaaacagtatatccagataagaaattgatttttaaggattcatacattcagtatgagctaataattgaatgggatggagtggaagtgaaaatacatacattacactatgattattgtaataataagttgatgataaattatgatttcccgatgcgaaaattatttcatttgtttcaacagcaaatgcaaaggtcggagtataagaaaatatttttatctcactctagttttgtagatattatttttagaatgagattttgggatagctatataggagaagtggtgagctttatttcacggaaaatatttagaataataagaaaaataataatttttgtaggacttcataaaccatataattgctaaaattaattcctgaattcaaacagacaatgcaacagtgtcgaattcattgttagttaataatttatatttttcctttggggtcatgtaacccaatctttttctcggtcttgagtttaagatgttttgaacgcgcattacctgttcattggttatgtccctaaagtccgtacccttcgggaagtattgcctaatcaaaccattgctgttttcattggctcctctttcccacgagtggtatggttttgcaaagtaaacaaaaatatttagtttacgtgcaatttcttcgtgaaaactaaattcttttccattatctgccgttattgtatgtatttggtctctaaaaggttccaaggcatcgatggcagctttagttagcgggctggcatctttcccgctaagtagtcttatccatactagtccagttaccctgtcgtttatagttaatagtgctcctttgtgattcattccaatgactgtgtcaatttccaaatcaccaaaacgtactttcttgtctactatcgtaggacgcttgtctatgtccacgcggtttttgataaaaccacgtccattagtcaatgcacctctcttcttatgacttcttccccgtcttcttaaatgcttgtataacaacttatctccatgctttttatcttcccaaatatactggtagattgtctcatgagaaactgtttccaagccctttgttcgcataaacccagtcacttgttctggactgaaatctttctttatgagtatatctacttgaattttcaagtcgtccgtaaacttcacgaagtgctttcgtgaacgcattctggacatatacttagcctgagcgagatccggtttgtaaatgccattacgtttatcactattacgacgtaattcacgacttatagtgctacgatgaactcctacaagattggcaatctcggttcttgactttccgctttgcagataagcggaaatgttatacctttgttcttcggttagctgtttcatattgcaactgaatgttggggaactggaagatgcaaagaaacaacttttccacaggggaacaaaagggaaagaaatcttctttctctgttcctctgaaaaattattcttttcgtatcttctcattgtcatcattctcactcctgttgcattatccgcttgaacttaggatttttaataaatgaataaatatttaaaggagtcaataaaatatttgctaagatcttatcctgttatttacccttatgtaaaagaggttgagcggatgtataatatgtcacatgatgaactacagggaagaaatgaaagggtattcttaaaaattttccgcaaagcatatacaaagtcttctttttatcataaactttatactgaagcaggtgtaaaattagaagatataaaatgcttaggtgatataagcaagttgccaattgttactaaagatatgattcttcatcagtctgatactttgcttaccacatctaagtggaaattattaaaaaataggacaagtgggactactggaacccctttgaccgtgtttgaggactggaagtcaatttggagagagcaagcttatttctattgctataggaaacgttgtggatatacctatggacaaccattggtatctttacgtggaaatttaggaaagaaagatactatgatgtatgtacatatatcaaatactctctatctttcaagctataatataaatgaacaaactgtttgggcgtattataaagggattgaaaagaggagtcctcgggcaattgaaggatatccaagttccttatataatttggccttattgctaaaggataaaggattatattgtaatattcctgtgtgttttacatcttcggagaacttgttggattttcaaagacaattgatagaggaacggtttcatactaaaatatttgaccattatgggactacagaaaggacaataagaattagtgaatcaataaaacatgatggctattttgaggatccaggctattctatcaatgaatatctgaaagatcgggttatatcaacatcgttaataaattcagcttttcctttgatacgttaccaatcgagtgatgttgtaatattgaaagagaatacgaaggatgaacgtgtttctattgataggatacaagggagaagtggtaattgcataaaaggtaaggacggttcgatatataataatgctgctttgacttttattttaacctatagccataatattcgttatgcacaattcattcaaaagaaaaatggaaaggttttgcttaatattgttccagaagctgttttttcttctcaaaatttggatgagttaaagcaaatgattgatttaaagattggtttgtctaatctggaacttgagattaacttgattaaagaacaggatttaatttatactacccgtaacaaatacagttatatcatatcggaataaaagtgtaactgcaagaaataatttttatcatgaatattagtattttcggtctcggctacgtaggatgcgtaggcgcagcttgttgtgcaaaattgggtcaccatgtaataggagtggatgtgtcagaaaacaaagtgaacctgataaaatccggtcatcctaccatcatagagaaagacattgaagaactgtgcgcagaagggcataaaaacgggcgtttgacagccactctagatgtccatgaggcagtccatcattcggaaatctcttttatagcggtgggaactcccagttccaaggaagggcatctaaaccttagctatatttacggagtggcaagacaaataggagaagctataaaaacgaaggaaacctatcatatcattgccattcgtagtacggtattgcccggaaccaataaaaaagtaggtgagatcatagaagaggcatccggcaagcagcgtggcaaggcatttactgtggtatccaatccggaattccttcgtgaaggaacctctgtacatgattatttgaaccctcctttgactttgattggtacagattgcgagtatgccgagcaaaaattccgtgaactgtataaagatataaatgcggaattcgtatgtactgatatcaaagttgcggaaatgatgaaatatgtcaataatacatatcatgccttgaagattgttttcggtaatgaagtgggcaatatctgcaagggactggatattgatagccataaggtgatggaaatcttttgtaaggatcgtgaactgaacatatcaccctattattttaaacccgggtttgcatatggtggctcttgtttgcctaaggattccaaggctctccgcaccttggcacgtgatttatatattgatgttccagtcattaacagcatagaaaattccaatgagattcaaaaaaagaatgctgtttctgtcataatggggaaaggaaagcggaatgtgggtgttctaggcttgagctttaaagcgggaacggatgatttacgttgcagtccgatagtggatgtcgtggaaactctgctgggcaaagggttcaatatccgcatttatgacaaaaatgtgaaaatttcggaactgacaggaacgaataaggatttcataatggcgaagattcctcatttacaacattttgttacagataaccttcagtccgtgattgaggggagcgatgtgctggtggttactaataaagaaaaagagtttgcagatattttgcaaaactatccgggtaaaatcatcattgatctggtacgggcttggaaagacgtggattatgccggtgtttatgaaggattgtcctggggaaatattaatgcgaataccgcagcgcaatatcagaaaatagagaaagacatcaaaggaacggaattttaacaactcatggaacagaggaaagtactgattatagtggagaatctacctgtaccgtttgacacacgggtatggcaagaagctaccacattagtggagaatggatacggtgtgagtgtcatttgccctaaaggcaaaggttatgacaaggattatgaatatctgcaaggcgtgcatatctatcgccatcaattgccacgggaaggaaatggcgcatggggatatgcccgtgagtattattgtgccttgcgcgatgaatatcacctggccaagaaaatatttaaggaacggggcttccatgtgattcacggatgcaatccgccagatgatatttatttggtggccaagccttttaaaaaacatggagtggattatgtttttgaccatcatgatatttgtccggagttgtatgaggctaagtttggtaagaaaagcggcctgctttataagagccagttgtggttggaacgtaatacctataaacactgtacttttgcttttgtcaccaatgagagttataagaagatagccatagaacgtggaggaatgaaaacggaagacgtatatgtcttacgcagtggtcccaaactggagcgtttgaagataactccggcaaaaccggaaatcaagcgtggtcgtaaatatatggtaggttatttgggagttatcggccagcaggaaggaattgaatatttactaaaagcggcttcccatataaagaatgattgggggcgtgatgatgtattttggggcattgtgggcggtggtccgcatctggagcagttgaaacagctttgtcatgatatgggtttggatgatattgtagaatttacaggccgagtgagtgatgaaaagctgcttgattatctgaatacggcagatgtttgtgtcaattcggatgaatacaatgaaatgaacgataagagcaccatgaataagatcttggaatatatggcactcggaaagcccattgtccaattcgatcttaccgaaggacgtcactccgcccaggcggcttcactttatgcggaacctaacaatgcggcagatatggcaaagaagattatagagttactggaagaccccgacaaacgtaaacggatgtctgagtatggtcgtagccgcataatcaatgaactgagttgggaacatacttcaaaagccctgcttgaagggtatgatagatatttcaagaaaagaggtttataggaactgcctcaattatagtcttcatgaaaaaaatctcctggtattataatcgtctgcgggcaatgaatgccaaagaaatactttggcggttggaacaaaagaaaagccagcatcgggaaaaggtacgtttcgccaatagcgatatggatataacttcaagcctgttctatgaagaaatatcgcatctgtcatttgacgccggtcgtctgggactgaattttaaaaacaagaagttcggtgtacggacggatattcacctgttggggggatatgattatggaatttataaacaggactggcatgccggattccagacaggcaataaatggtcaaggaaattcagttatagtttgccatataaacaatgtgatcatatcggggacgcgcgtactaattgggagttgaaccgtcattttcagtttgctttactggcaaagaatttttatgctacaagcgatttgaagtattatagggaattgcaagctctttttgacagttggagaagggagaacccttttttaaaaggtatatcctggaccagtgtgatggaagtggccatacgggcgataaactggatgtacacgcttgcttttctttcccaaagtaagaatgtggataaggactttaaaatcagactttccgttggaatccgtaatatgataggctatgtttcacaacattactcccgtttttcatcggccaacaaccatttgttggtagaagcgacagctatcgggcttgcaggactggctttccattgtgagaaatggaaaacattgggaatttccatccttacggaagaattattgaaacagaattacacggatggagtgaacaaagagttatcattgcattaccagatgttcggtatggaagcttatgcgctgatgatacactccatgcagacctgtaattgcaatgtaccggaaatttggcttcagatgcttgagaaaatgacagaatatgtaggatgttcatcatggagagggaatgttgcaatggaatttggtgatgatgatgaaggcaaaattctggatttgcagggagaagaaatcaatcatctgcaatatataatgcaattatgttctttggtattgaaaactccttatcaatatattttccaacatccggttaatgaaacggtctgctggctgtttaccgatgaagagataggtgacatgaggagaatggaacctttgccgatatcagatgcttgttgttttaaagaaggtggaaatacattccttcgtgacggacaggatcgtgtattaatcggtattgatcatgctgctttgggttttggaagtatagcggcccatggacatgcggatgccttaagttttcagatgatggtggatggaaagatgttgtttgctgatcccgggacgtatatttatcattgtgatttacctttccggaatttatttcgcaaaacggagatgcataatacattatgtatagatggcagaaaccagagtgagatgctgggtgctttcctttggggaagaaaggcaaagtgtacattggaaaactattctgttgataataatattgtaagacttgaagcgtcccatgatggatatgcacctgtccggcatcagcgtgtgtttgaatgggaacattccaatttaaaattgcgaataaaggatgggataactaaagcggtaccttggtgtgctactttgctgttgggaccagactgtgaggcatatatagataggaatacgatacaaatacgtatgggagaaaacagttgttgtgtaaatataaacacaccgatcgacttagtcgggatagaagatgtctggctttcgccttgttatggaaaaaagatgaaaacaaaagctatcaaaataagggggaattcaaagacgttagaagtggaactgcatttattcctgaaggatttgtaatgatgtttattcttgaatttgaaaatgtggtagttacaatgaaaagttgtaatagtactaagaaaagacgatggaaatgtaatgcactcctgattctatttctattgtgcggatgtttacatatacatgcacaggctttaaggggaaccacaggattattgcatgcaccgacagctgatatggagaaggataaaacattcaaatttggtggtaatgtacttgatataactccacttcggtatgaggattttgatgtgagatatacatttaattattatctgaatatcacaatcttcccatggctggaggtgggatatacctgtacattgaattatgccaatgaagggtctacttatttcccggaaaaagtttgggggaaatattcaaatcaagaccgttccttttatgggcggttacgggtatggaaagaagggtggtggaaaggctggacaccgcagatcgttgtagggttggatgatccaggaacacatgaagcatcgggagggggagggatagcctcacggaatgaatcaggcggtaatgctttttttatgcgttattatatagcgatgacaaagcatattgattttgcaggtattggaaatttggggactcatgtatcttatgttattgaccggccggctaattatcctcaggcaaagggtatagccataggtgcaaattttaagatacatacattaggagaatcttggggaaacaaattgttgaacggtttcaatctgatggccgaatatgacgcccgcacagtgaatatcggggcacattaccagctttggaaagaccacatcaacctgattgccgaattgaacaatgggaaatacttctccggaggcatttatttcaagattcatctgaaatgataaaaaagaggctcctattagaaatttccggttagattttgttcctttgtagtacaatcaaaaaacgatgaatcatggaacagcagcagttgaagagatgcccgataggggtacagacttttgagaaagtcatagaggggaactacctttatatagataagacggaatacatttaccgtatggcacacggtgcttccaattattatttcctgagccgtccccgccggttcggtaagtcgttgctggtttccacgctgcatagttattttgccgggaagaaggaactcttcaaagggtttgccatcgaaaagctggaaaccgaatggacggaatatccggtgctgcactttgacatgagtctggccaagtatgtggacaaggaaacattggaaagcatgctggatgtgcagctctttgaacatgagaaatatacggaaagccggaaagggcggttactcttaatgacaggatgaagacactcatcatgcgtgcctgcgaacagaccggccgccaggtggtagtcctcatcgacgagtatgatgcgcccttgctggatgtgatgcacgaggaggagaatctccccgtacttcgtaatgtgatacgtaatttttacagtccgctgaaggcatgcgacccttatctgcgctttgtgttcctgaccggcatcaccaagttttcccagctcagcatcttcagcgagttgaacaatatctcgaatgtcagtatggacgagccttacgctgccgtttgcggcattacggaggaggagatgctggaacggatgttaggacacattgaatgtctggcaggtgcgctggagatgacgtgtgaggaaaccagactgaaattgaaagagaaatatgacggttatcatttcacttggccttcgcctgatatttataatccgttcagcctgctgaatgccttggaaagaaagaagatagacaactattggtttggcagtggtacgcccacttatctggtagagatgctgcgtaagttccacgtccttccctccgaggtggggcacagcatgcaagccatggcttctgattttgatgcgcctacggagaaaatggagagtatcgtgcctctgctctatcagagcggatacctcactataaagggatatgataaagaatttggaatgtaccgtttaggttttccgaaccgggaagtggaagaggggtttgtacgtttcctgctccctttttacgcgaacgtaaataaggtggaatctccctttgagattcagaagtttgtccgtgaggtgcgttccggtgattatgactccttcttccgccgtctgcaaagtttctttgcggatactacctacgaagtgatccgcgaacaagaactacattacgagaatgtgcttttcatcgtattcaagcttatcggcttttacacccaagtgaaatatcatacaagcaaaggacgcattgaccttgtcctgcaaactgacaagtttatctatgtgatagaattcaagctggacggcacggccgaggaggctttgcaacagattcatgacaagcattacgcgcttccttttgcttcggacggacggaagctctttaaaataggggtgaacttcagcgctgaaacccgcaatatcgaaaagtggatagtagaagaatgaaaatatagaaagaaaatagagtccgaagaaaagaggtgcacactgctgcaatatccggtgaaacttggtacaagatccgcggaatcttgtaccaaagtttttgtaatcttgtgacgggtggcggctagttcctttggacattgcaaagataacttcacgtccgtgcggcgtaatctcttctgaccccttggcggattgcagggagtttacggggacacggggacagtggggacacccccttttttcctcacacacgtatgcgtgtatctataaagggaggataagttgggtgatatattcccttgccgtccacacttaccggtacctcttatttggtgaaacgtttgcccaaaggaggacggtgctttcggttatcctccctgtcgtgcgtttttttcagaagttccggccggacataatcctgtgggaaggcagggggaaagatgattttcccacctaattatatcgcgcgtgcgtgtgtgagaaatttggagtctgtccctgctgtccccactgtccctgcttgggagagccgatgtgaactgccatctttaaattctcaatttttaatcttcctccgtatcaacgtttcctcgtcctacgagaggaaacaagctcgtaccggctccttgccggaacgttccacgcctttgccgggatgatttttcttattatccgcactgttgctgtgggaatcatagaccgtttgtacgtagttcatcgccccatgggggttttattgccggtggtggccggcatccgcttatgtattacccaaacgacactcttcgtgattaccagcaggagatgaagctccgcctctttgaggagtgggagtttcatcggaatgtgatggtgcagatgcccaccggtacgggaaagacgcatctgctggccgccatagtgagggaattcctgcgtggttccggcagccgggtatggattgtggcgcaccgccgggagctggtggatcagatagaggaaaccgtgtcccggcacgggatgagcaaagaggacggaagggtgagggtgatgtccatccagtggttgtcacgaaaccggaaggatatgtacgaagaaccggagttgatcgtcatcgacgaggcgcatcacgccctggcggaaacctaccggatactttgggagaaatatccggaggcaaggaaactgggcatgaccgccactccctgccggctgaacggcaaggggttcacggacttgttcgacagcctgatcacttcgtggactgtcgcggaattcatcggaaaagggtggttgtcatcctttgactatgtgtccatccgtgcgaacagcaaagaacagcggttgatagactcgttgaagaaacggggtgcggacggggactaccaggtaaaggagatgaacgaggtactgaaccgggagacaagtatcggccggctgtatgagagcgtggaacgatatgcccacggaaagaaaggaatcgtatatgctgtcagcatcgcccatgcccgccggatagcggcttgttatagcgcacacgggctggagtctgttgctatcgacagcaggactccggcttcggaacgcaaggaactggtggatgatttcagacggggaaaggttaaagtgctggtcaatgtggatatcttctccgaaggcttcgactgtcccgatgtggagttcgtgcagctggcacgtcccacgctttccctggcgaaatacctgcaacaggtaggacgtgggttgaggagatcggcaaacaaggagtcctgtatgctgatagacaatgtgggtctgtaccgcatcttcggtctgcctgcccggaaccatgactgggcggcgatgttcgagggacggatgattggcaacgcgctgtcccgggcacggacggaaggcggattgtacctgcctgctttgtcattgacggacagtggcgggcaggaggaggaggtatgggagattgttatgactcacgaccggttgctggaagccatccggaatcgggaggaagcagaagagggaaaggaatcacaagccgccttgaaatcttatcccgaccggcggagtagcctgtgggggctgaagcgtggaaacaagataacagtgtctccccgttatctgcaagtctttgacattcagggaaaccgtgtggcagtccgtttgaaagatggacaggcaggagtggtgagtgcctccggggagccggaaatgatactcgggtattgtcggagattgaagttcctgaaagaggaactgctggctgttacggatactgccggcacggtttcctacatggacatgaaaacaggccgcacttaccgggagaagccggtggtgttttcctacggcggtgtggaattgctgagggtaggggagactttccatagccgtacaaaaaaagcatacgcctccatgaacgggttgcataaagacagcatctgcttttatgaatattacttgaagataccggattatcgcgtaccgaagtcctgcaagctggtggattccgtatggtccacggtgtttgatgtgttcgcctgcttgttggcaggggatgacgaggaagtttattggtgctgcggccgtctggccgaccggagcatcgtggtgatggacggggctggaaggtattaccatgtggaaaaaggaaagaggaagcggtacattgccactaaccttcccagacccggtgagcaggacttcgacacggctgtaaagaagctgaaagaggaagccggacagcgggcggaggaaacggaccggcagaagagaaggaacgaggaagcgaaaaggcggaagaggctggaggagataagagatgcccttccgtaccgtatgggcatgaaatggggcttgaaactgggggaacgtatcatcgttcctcccaaatacagaaagattcttcctcctgtgggcgtttattgtgcttttgaagagagcgcctgccggtggggggtgatggcactggacgggaaagtgatggtggaagcctgctaccagaaggtagatatagaaaacaatggcacggtacacctgaccatcattcccggcaaagtgaaaaccgtcaaactgtaagtgtttccggaatgaaacacaaatgacgagaatgacataaattaaaaatcaagataaatttatgccattcccgtcatttgtgttctaaaaaaaaagtgagtatctgcctgagtttgcacatacattcagaaaggtttctattattacagaattttttccataataagcgccaattctttcttttttcacattttttttctgtacttttgcgctcaaatttaaaaaccattttttataacccaatatggcaaatgtgattaaattacacaaaggcttgaacatcaacctgaaaggaaaacccgttcaggagttctttgacgtgaagcagccggacatctatgcgatagtgcccgatgattttcatggcgtgactccgaaagtcgtggtcaaggaacaggaatatgtgatggccgggggaacattgtttgttgacaagaaccaccccgaagtgaagttcgtatctccggtaagcggtgtcgttaccagcgtggagagaggcgagcgtcgtaaagtcttaagcatctccattgcagcagcaaaggagcaggactatgaagagtttggaaagaaagatgtttcaactctgacaggagaacaggtaaaagctgctctgctggaagccggactcttttcattcatcattcagcgcccatacatcgtggtggctgatccgaatgcccaaccaaaaggcatcttcgtttctgcatttgacactaacccattggctgctgatttcgaatttgttctgaaaggccaggaaaaagatttccagacaggtctggacgcactggcaaagatggcaaagacgtatctgaatatcagcgtagagcagaagagtcctgcactgaccaacgccaaaaatgtaactgtaactgccttcgacggtcctaaccccgccggaaacgtaggcgttcagattaaccacatcagtcctattaacaaaggcgaaactgtttggacgctccgtgcggaagaagtgatcttcatcggacgcctgttcaatacgggtcgcgtagaccttacccgtactatcgccctgaccggttcggaagtaaagaaaccggcgtattgcaagctgaaagtaggagccctgctgacagatctttttgcaggacgtgtgaacggaggtaaaaacttacgctacattaacggtaacgtgctgaccggaactttggtgaaacctaacggattcctgggcgcacacgctacaagcctcactgtgattcccgaaggagatgaccagcacgaattcctaggctttatcatgccgcgtaccgatcagtacagtgccaaccgcagttatttcagttggttgtgcggtaacaaggaatatacactggatgcccgtatcaaaggtggcgaacgccacatgatcatgtccggtgaatatgacaaggtattcccgatgagcattttccccgaatatttaattaaagctatcattgccggcgatattgaccgcatggaagcacttggtatttacgaagtggctcccgaagacttcgctgtatgcgaatttgttgactcttccaaattggaattgcaacgcatcgtacgtcaaggtctggacatgcttcgcaaggaaatgtgctaaataattaaaaactaagaattaaaagttaatgaaagcgttaagaaattatctcgacaagataaagccaaactttgaagagggcggcaaactccacgcgtttcgttcggtgttcgacggtttcgaaacattcttgttcgtacccaacagcacttcgaaaacaggagttcacattcatgatgcgattgacagcaagcgtatcatgtcaatggtggttattgcgttgataccggccctgttgttcggtatgtacaacgtaggttaccagcacttcttggcagtaggccaggaggcaggtttctttgaaaagtttatttatggtttcctggcagttctgcctaagattatcgtatcatacgtagtaggtctgggaatcgaatttgtggtggcacaatggaagaacgaagaaattcaagaaggcttcctggtatccggtctgttgatcccgatgatcgttcctgtggaatgtccgttgtggattctggctgttgctactgcgttctccgttatcttcgctaaggaagtattcggtggtacaggtatgaatatcttcaaccctgctttgattacccgtgctttcttgttcttcgcctatcctaccaagatgtccggtgatgccgtttgggtaagcactgacagcattttcggcattggcggcggacaggtagtggacggttttaccggtgctacgatgttgggacaggctgctacagccgctccgggtgcaagcgaactgattaatgtgaacggtactcccgctaccatgtgggatatggttgtaggtttgattccgggttctatcggtgaaaccagcgttatcgctatcgcactgggcgctatcatcctgctgtggacaggtgtggcaagttggaagacgatgttctcagtctttgccggtggtatcgtgatgggattgatcttcaatgtgttcggttctacagataacatgatggctcagttgccttggtacgaacacatcgtattgggcggtttctgcttcggtgctgtgttcatggctaccgaccctgtaacttccgcacgtacggaaaaaggtaagttcatctacggtttcctgatcggtgtgatggccattgtaatccgtgtgttgaatccgggttatcctgaaggtatgatgcttgccatcctgctgatgaacatcttcgctccgctgattgactactgtatcgtacagaagaacatcacagcccgcgaaaacagattaaaatcaactaacaactaaaatatcggacattatgaataccaatagtaatagttatactatcatctatgcttcgataatggttgttgtcgtagcattcctgctggcattcgtttcttcttctttgaaagaaacacagtataagaacgtggaaatggacaccaagaaacaaattctggctgctctgaacgtttatgatgtaaaggatgtcgatgcagaatttacaaaatatgagattaaggacatgctggttcagccggacggaacattggctcctaacgacggagcgttccagacttcttataagggtgaaatagcaaacaaccgtctgcacgttttcgaatgtaatgtagatggtcagaccaaatacatccttcctgtttacggtgccggactttggggtcctgtatggggatacattgcattagaccaagataaagacaccgtatatggcgtttatttctcacacgccggtgagactccgggtctgggtgcggaaatcacgacagttaagtttcaagaccaattccttggcaaacatgtgttggaaaacggtattgtagctttaggcgttgagaaacatggcaaggtggcaaaacctgactatcaggtagacggtatctcaggaggtactatcacttctaagggtgtagatgcgatgattaaggattgcctgagcatgtacaattcatttttaactaataaataagaggagggtaaatagaatatgagcgcattattttctaaaaagaatagagaagttcttttaaccccgctgggtttgaataaccctgtcaccgtacaggtgctcggtatctgttctgcactggctgtaacggctcagttggaaccggctatcgtaatggggctttctgtaaccattattacagccttctcaaacttcgttatctccttgttgcgtaacaccattcccaaccgtatccgtatcatcgttcagttggtggttgttgctgcattggtgactatcgttagtgaaattttgaaagcattcgcatacgatgtaagcgtacagctttctgtatatgtaggtttgattattacaaactgtatcctgatgggacgtctggaagcgtttgctatgatgaacggtccttgggaatcattcctggatggtatcggtaacggattgggttatgccaaaatcctgattatcgtggcattcttccgtgaactgctgggtgcaggtacactgttcggcttccaagttatcccgcaggctgtttatgacttgggctacttgaacaacggcttgatgttgatgcctcctatggcgttgattatctgcgcttgtatcatctggtaccaacgtgcaaaacacaaagaattgcaggaaagtaataattaatccccgttataaaacgaaaagaatatggaatatttaagtttgtttgtaaagtccatctttgtggacaatatgattttcgcatacttcctggggatgtgttcttacctggcagtatcgaagaacgtaaagacagccgtaggtctgggtgcagccgttactttcgtgttgattgtaactttgccggtgaactatatgctggaaaattacgtactggcacctaatgcgctggtagaaggagtagacctcagtttcttgagctttatcctgtttattgccgttatcgccggtatcgttcagttggtggaaatggcggttgaacgtttcagcccgtcactctatgcttcattgggtatcttccttccgctgattgctgtaaactgtgctatcatgggtgcttcactgtttatgcagcaacgtcatttcatcaacattggcgaggcaacaacttacgctttgggctcaggtatcggttgggcactggctattatcggtctggctgctatccgtgaaaaaatggcttactctgatgttcccgctcctttgaaaggtctgggtatcactttcatcactgtaggtttgatggcaatggcatttatgtgtttctctggtttgaaaatctaaaaggaaaggaataagacaatggatatgaatttaatattagctagtattggagtattccttggaattatccttctgctcgttgttattttgctggtagctaagcagtatcttactccgagcggcaaagtaaagataactatcaatggagagaaagaactggaagtagaacaaggttcaactttgctgaacaccctgtctgttaatggtatatacctgtcatcggcttgtggtggtaaaggttcttgcggtcaatgtaaatgccaggttgtagaaggtggtggtgagattcttccttctgaaaaaggacatttcagccgtaaacaacaacaggatcattggcgtctgggttgccaggtgaaagtaaaaggagacctgggcatcaagattgatgaatctgtaatgggtgttaaggaatgggaatgcgaagtaatcagcaacaagaacgttgccactttcatcaaagagtttattgtggctttgccgaaaggtgaacacatggactttgttccgggttcatacgcccagattaagattcctaaatttgaaatggactacaacaaggatattgacaaagaccttatcggtccggagtatctgcccgcatgggaaaaattcggcctgttcggcttgaaatgcaagaatacggaagaaacaatccgtgcttactctatggccaactatcctgccgagggcgaccgtatcatgctgacagtacgtatcgctactcctccgttcaaaccgaaagatcagggtcccggctttatggatgtgaatccgggtatcgcttcatcttacattttcacgctgaaaccgggtgacaaggtaacgatgagtggtccttacggagacttccacccgatcttcgattctaagaaggaaatgatttgggtaggtggtggtgccggtatggctccattgcgtgcgcagattatgcacatgaccaagacactgcacactaccgaccgtgaacttcactatttctatggtgcgcgtgcattgaatgaagtattctatctgcaagatttccagcaattggaaaaagacttcccgaacttccacttccatctggctttggaccgtccggatcccgcagccgatgcagcaggcgtgaagtataccgcaggtttcgttcacaatgtgatgtatgaaacttatctgaaggatcacgaagctcccgaagatattgaatactacatgtgtggtcccggtccgatgtctaatgcagtcgttaagatgctggatagtctgggtgttgaaccttcttctatcatgtacgataacttcggaggataatatcaggatctccttttattaataatgaaaataagcccggtaaaagtgaacttttatcgggctttttctttacttttgtataaaacgaaaataaatatgatagagaacatactagccaatttgaaaattgagcgactgaacccgatgcaagaggcgtccattgatgcttggaaagagggaaaagacttaatattattgtctcctacgggatccggcaagacgttagcttatctgttgcctttggtgcagagtttgaagcctggtataacaggcgtacaggctatagtgctggttccttcccgggagctggctttacaaatagatcaggtattcaaatccatgaatacgccattcaaggctgtaagttgctatggcggacgacctgccatggaagagcaccgtaccatcaaaggggtgcagccatcagttatcatcggtacaccgggccgtatgaatgaccatctttccaaacagaattttgatgcagacacggtttccattttgataatagatgaatttgataaatgtctggaattcggttttcaggaagagatggcgactgtcataggacagttacccggtctgcaacgccgttttctgttgtcggccaccgatgcggaagagattccgcagtttacggggctgaacaagaccattaaattgaattttttaaatccggaagagcagcttacccagcgactgcatttatataaggtactatctccggaaaaagacaaacttgaaaccttgtataaactactttgtaccttgggaagccaatcgacattggttttctgtaatcaccgtgaaagtgtggaaagggtaggaaagtatcttcaatccaagaagtttcaatgtggcatttttcatggcggcatggaacaggatgaccgtgaacgctccctatataaattccgcaacggaagttgccatgtgcttatttctaccgatctggccgctcgcggactggatatccccgaaatagagaacgtggtacattatcatctacctgccaatgaggacggttatatccatcgtaacggacgtaccgcccgttgggaagccgaaggaaattcatacgttattcttcatgctgaagaaacactgcccggatatatagccgatgagccggaagaattcatattgccccaagtgcctcccaagccgtccttgcccgaatacgtaacattatatatagggaaaggcaaaaaagataaaatcaataagatagatattgtgggctttctctttaaaaaaggtaacttgaataaagacgaaataggacggattgatgtaaaggaccactattcttttgcagccgtatctcgcaaaaagataaaacaaactttgaatttaatacgaaacgagaagataaagggcataaaaacacttattgaagaagccaaataatgacaatttgtcaattctcgaaatgaaatgattaaagaataattcaaaaagatattttttttatgctttagatcattgtttactagggatgtagttacaaaatgaaagcataaaaattcagatttaactaatttgaaagaaaattatgcggaaattcgtaaatttattagcgatttttttggaaaactgaaaataatgtgtaatttcgcccaatgtaagatataaacaaattgtataaccaaaacaaacttcaaatgaaaaagcataatttcaatgcgggaccatctatcttgcctcgcgaggtaattgagaaaacagcacaagccgttcttgattttaatggttctggtctttccatcatggaaatcagtcaccgtgctaaagattttcagcctgtagtagacgaagctgttgctttgtttaaggaactgttgaacatcccggaagggtactcggtactattcttgggaggtggagccagcttggaattctgtatgatacctttcaacttcctcgaaaaaaaagctgcttacctgaatacaggcgtatgggctaagaaagcgatgaaagaagccaaggctttcggtgaggtagtagaagtagcatcttccgctgaagcgacctatacctatattcccaaagattatacggttcccgctgatgcagattatttccacgtcacaactaataacacaatctatggaacagaacttcatgaagacctggattctccggttcctatgattgctgatatgtcatctgatattttctctcgtcctattgacgtttctaaatatatttgtatctatggcggtgcgcagaagaatttggctccagccggtgttactttcgttattgtaaagaacgatgctgtgggcaaggtatcacgctatatccctactatgctgaattatcagactcacattgacggcggctctatgttcaacacccctcctgtacttcctatttatgccgctttgcagactttacgctggataaaagctaacggtggtgtagcagaaatgcagaaacgtgctaaagagaaagcagacatgttgtatgctgaaatagaccgtaacaaaatgttccgtggcacagtaacggataaagccgaccgttcttatatgaacatttgctttgtgatgaatgacgaatacaaagagctggaagccgatttcatgaaatttgccacagaaagaggtatggtgggtattaagggacaccgttctgtaggtggtttccgtgcatcttgctacaacgccatgccgaaggaaagcgttcaggctttgattgactgcatgcaggaatttgagaaacttcattaataattatgttcaccacagattatacgaattacacagataggaacaataaatggaatctgtgataatccgtgctaatctgtggtgaatctttttaatacaataagaccatgaaagtattagtagcaacagacaagccgtttgcaaaagttgcagtagacggtatccgtaaagaaatagaagcagcaggttatgaacttgtattgctggaaaaatatggtgaaaaagccaaattactggaagctgtaaaggacgttaacgccatcattatccgaagtgatattattgatgccgaagtattggatgcggcaaaagaactgaaaatcgtagtacgtgcaggagcaggttatgataacgtggatttggcggctgctacggcacacaatgtatgtgttatgaatactccgggacagaattccaatgcagtagccgaactggcttttggcatgatggtgatggctgtccgcaatttctataacgggacttcgggtactgaactgatgggcaagaagttaggtatccatgcatacggtaatgtaggtcgcaatgtggctcgtattgctaaaggttttggcatggatatttatgcttttgacgctttctgcccgaaagaagtaattgaaaaagatggtgtgaaagctgtttcttctgctgaggaactgtatgctgcttgtaatgtagtgtccctgcatattcctgctacggctgaaactaaaaattccatcaactacgaattggttaacaagatgcctaaaggaggagtattggtaaatactgcccgtaaggaagtgatcaatgaagcggaattaatcaaactgatggaagaacgcaccgacttaaagtatgttactgatatcatgccggttgcccatgctgagttctcagaaaaatttgccggccgctatttctctacaccgaaaaagatgggagcccagacggctgaagcaaatatcaacgcaggtattgctgccgccagacaaattgtaggcttcctgaaagatggttgtgaaaagttcagagtaaataagtaatccaataaccgcaggggcggattgaatccgaccgaatgcatatagcttatgttttcgggcgaatgcaattcgcccctgcaagtaaaatctaatacctttatttttatggcaataataaaacccttcaaaggcatccgccctccgaaagaattggtagaacaagtagcttcacgcccatacgacgtactgaattctgaagaagcacgtgaggaagcgaaaggtaatgaaaagtcactttatcatattattaaaccggaaattgatttccctgccggaacagacgaacacgatcctaaagtatatgagaaggctgccgaaaatttccagatgtttcaggacaagggctggttggtgcaagacggaaaagaaaattattatgtatatgcacaaaccatgaatggcaaaacccaatatgggttggtggtaggagcgtatgttcccgattatatgaacggggtcatcaaaaaacatgaactgacccgtcgtgataaggaggaagaccgcatgaaacatgtccgcgtaaataatgccaatatagaaccggtattctttgcttacccggataatgcggaattagatgctatcgttaagaaatatacttcacaacagccggaatatgattttatcgctccgggtgacggtttcggacattcattctgggtgatcgacaaagaagaagatataacagctatcacaaaagctttcaaagctatgccggctctttatattgccgatggccatcatcgctcggctgctgccgccttggtaggtgccgaaaaagcgcagcaaaatgcaaaccatcagggaaatgaggaatacaattactttatggctgtatgtttcccggccaaccagctgactattattgattacaatcgtgttgtaaaagacttgaacgggctgtctccggaacaattcctgaccgctgtcagcaagaattttgtagtagaagagaaaggcattaaggtttataaaccgcaggctcttcacaatttctctctctatctggacggtaaatggtacagcttgacagcaaaaccgggcacatacgatgacaatgatcctatcggagtattagacgtgactatttcttccaacttgatattggatgaaatattgggaatcaaggatcttcgttccgacaaacggattgactttgtaggtggtatccgtggcttggaggaattaaagaagcgtgtggacagcggtgaaatgaaagtggcttttgccctttatcctgtttctatgaaacaattaatggatattgccgataccggtaatattatgccgcccaaaacaacttggtttgaaccgaaacttcgttcgggattggttattcataaactgagctgatcaatatagaacacggacagaagaacaaacctgcattttctctctctgtccgtgtccgttcatttcatataattttttcagcagctacaggtgatataaattcttttatatttgttgattaggtataatctaaataaatagatgttagattgaaagaataaagcacttttcctttgtttattgctaacaaatatctaatttcgcgccgattttaaagcgtgtaataaaaacgatgattaacaacaagactaaaggatttctccttggggcaatcgcagcagccagctacggcatgaacccactgttcacccttcctctttatagtgcaggaatgagcgtagactcggtattattttatcgctatgcactggctatagttgtactaggtatcatgatgaagatgcagaaacaatcttttgccattaagaaagcggatgtgctgccactttgcatcatggggttgctgttctcattctcttccctgtttctctttatgagttataactacatggatgccggtatcgcatccaccatattgtttgtctacccggtactggtagctattattatggctgtagtatttaaggaaaaagtatcgccggtcactatgttttccatagcgctggcctttgtgggaatttccttgctttgtaaaagtccgggaggacagacactcagcttggtcgggattacttttgtctttttatcatccttagcttatgctatctatatagttggtgtaaaccgttcttccctgaaggatatgcctatagccaagcttactttctatgtcctgcttttcggtctgtctgtttatgtggtgcgattgaagttctgtacgggattgcagcttatccctacacccttgttatgggtaaacgcaatttcactggctgtttttcctactgttatttcgttggtgactatgacaaaggccatacactacattggctccacacccactgctattctaggtgctttggagcctgttacagctttattcttcggagtactgatttttggagagcagctgacaccgcgcattattctgggcattttgatggtgattactgccgtaactctaattataggaggaaaaacattgctgaaaaaaagcaagattcggttaaggcatactggcaaataagatcggattttgtatctttgcccttgtaattataaattttccactatgaaaaaacaactgatgcaatgggcaggagtgggaatgtggatggtatttggtctgtccgcatgttctcctacaaaaacagaaatcggaaacctgaatgtcattccgcagccccaagaagtaagtcaagacattcaagcccacccttttgttattaatccgcaaaccggtattgtctatccggaaggcaatgaaaagttgcaacggacggcagaatttttagcttcctatattaaagaggctacgggaattaccgtccggacaacaactgaagccgcaaagaagaattccataatcttggcggttgacagttccattaccaacaaagaggggtatcaactggaggtaacttctgaaaacattcatttgaatggaggaagtgagtctggggtcttttatggaatgcaaacgctctataaggctttgccattgaccaaaaacaaacaggtatccgctgccatcccggtgggaactgttaatgactatcctcgtttcggttatcgcggttttatggtagacgtgggccgccattatttcccggtttcttatctgaaacaaatcattgatatgctggcattgcacaatatcaattattttcattggcatctgactgaagaccaaggttggagaattgaaatcaagaaatatcccaaacttacggaaataggttcgatacgtccacgtacgttgattgaccgtgaaacccagacctatgatgaaactcctcatagcggtttttatacacaggaagaagcaaaagagattgtcaagtatgccgctgaccgttttattactgtaattcccgaagttgaccttccgggacatatgatgggagctttggtttcctatccggaattaggttgtacgggaggtccatacgagattccttgtaaatggggggtattccctgatgtgctttgtggaggaaacgaccgggctttacagtttgctaaagatgtattgaatgaaattatggacatctttccatctccttatatccatattggtggggatgaatgtccgaaagtacgttgggaaaaatgccctgcatgtcaagctaaaattcgggaactgggtttgaaagatacaccaaaacacagcaaggagaatcaattacagacctatttcatgtccgaggtaggcaaagttattaatgacagagggcgtaaaatgctgggctgggatgagatgttggagggaggattggctccaggtgccacagtgatgtcatggactggtgtcaaaggtggtatcgaagccgcacggctgcaccatgatgcaattatgactcctattcagtttctttatttcagcaatcctacttacaatcggataaaagggactaaaagccttgaacgtgtctatacatttgaacctgtttctaatgaattggcagaggatgaacgaaaatatatcatcggtactcaaggatgtatctggacagaatggacgcgtgacagtttgaagatggaatggcaaattcttcctcgtatggctgccttgtccgagattcaatggacggaaccgttacataaaaatttcgacagttttttgaaacgtttaccagctctgctggctatttaccgggatagaggttatgattttcgtcaggatatttatgatgtgaacattgatatcgttccgactcccgatgagggaaaagccaagattgcttttcagacttttgatgatgcggaaatacattatacattggatggcagcgttcccgatgtgcaatccccattgtataccgacactatacaagtggataaagatgttatcatacaagccattgcagttcgtccgcagggtactagtcagataagtaaggaggaaatacattttaatgcagccacaatgagaccggttaccttgaataccattcctcataaatcatatacttttaaaggaggaagtactttgatagacggattatatggggatatgaattatcgctcaggacgttggattggtttctacgggacagatatgaatgtgatccttgatttacttgagcctaaggaagtatcttcagtttttgtaaacacaatgttgaacacaggcgatgctatctttggtacaacaggtctgaaggtggaagtttctgaggacgggaaaaatttccgcagggtagcctccgaaaattttcccgttgtggaaaaaggaactaaaatgcaaagccgcaaagactctgtttcctttgataaagtaaaagcccgctatattaaaatcatagcagaagttactccgaaacttcccgcatggcattccatgcctggcgaaaaagcttttctgtttgttgacgaaataggagtggagtaaattcgccttcggagcaatagctttctaaagaacaaatactaaacaagaaacggacattctgacaaaacagatgtccgtttccttatcaataaccctttcatgtattttcaaactagaaagctgttcaagaaaaaaatagcgatagagattcactctatcgccatcatgtgacatggaatgtctaattccttatgctttaggaagtgcttcttttacaaccatagtacggtttacatattctgcaccgttcaattgcttgatagcttctttagcttcgccatcattaggcatttctacaaaagcaaaacctttagaacgacgtgtttcacgatcagtaataagttttactgaagctactgttccatactcttccattacacctctcaaatcaccttccctaacattatagttaaggtttccaatatacaaattcataaaataaaaattgataaataaataattaagtaaactttgaatttaaaaatttagttagaagaatagaaacggttcaagtgtgagatgaattgagtcaatcgaaaaaactatctttttatattccgttgtcaaaggaacgataaataattggattatccactatatttctctttttattttgatatttttttaaccggtgactctttttatactttttaggcttaaagcaagagccttatatcattcatattcactaattttgtattaatagctaacttataactaagatttatatgatattgaatgaaagagaaagccgccatgaacatgttctgcatgtggcccgacaaatgatgacagcagcgcgtactgctcccaaaggaaaaggtgttgatattattgaaatagccatggtgacggatggtaatatcaatattttatcggaaatgatggtgaaaatggttgcggagcatggaatgaaattcttcctgcgcgatgcggaaaatattctgaatgcagaatgtgtcctgttaataggtacacacgaacaggcgcaaggattgaattgtggtcattgtggatatgccacttgtgtgtctcgcaaagaaggagtgccatgtgctatcaatagtgttgatgtgggcattgctatcggatcagcttgtgccacagcagcagacaacagggtggacacacgggtcatgttctcggccggattagcagcacagcgtctgaactggctggaaggatgcacccaggtttatgccatccctgtcagcgcatcctctaaaaatcctttctttgaccggaaacctaaagaataaatttctctactaccgcggctacaccatcttcttcattagaaagggtgatgtagtcggcgttttgacggactatttcttgagcattggccattgctacccccaatccggcatattgtatcatagaaagatcgttaaaaccatcaccaacggcaatcatttcttcttttgtcataccgatttcttttagcaatacggccagtgattgtgctttatcaatacctttaggaaccaattccaaaaaataaggttcggaacggaatacccccatacgatctttcaaatgttcgtacatttctttttcaagcactgcaagccgcgtaggttcacctacaatcagacatttggcaataggaaattttattgcctccagaaaatgatccactttcttgggagtcatcacattcagaatagcttctttcaatacatattcatcttccggatattcagtcaatacatattttccatcgtaagtgacgatagcaaaatggttgtcggtggcacatttatacaggtaaggtaatatatccggatcgagcacattctcgtacatcatctcaccggttttccagtctatgatctcacctccgttatacgaaagtatataaccttcgtatttctgcagctctaagatctcagccagtggagccacaccgtatgtgggacgtcccgatgccaaaacaatttttactccgcgcttttgcgcttcgataagtgtacgacgtgtgtgttccgttacctctttctttttattggtcaacgttccgtctaggtctaaaactaataatttatacttcatatactatttaatggagtgcttttgccaaattcgctgcaaatataacgattaaattcatggctttttgctacatttgctcaaaataaacaagaatcatgacagaaattttattaaccgtaattattatcctgctgataattaatattgtaatcgcacttactaaaaacaatcgtctgcaaaccgaacgtctggaaggattgctacgcgaagaaatgaaagaaaaccgggacgaactgggaaaaaatattcgcgaacttcgtaacgaactgaatcaaaccttgaattattctatccgtaatatgcaggatactttgcataaaaacctgctgaccggtaatgaaatgcaacgggaaaaatttgaagcaatgggcaagcaacaggaagctttggtgaaaagtacggaaaaacgattggatgacatgcggcaaatggtagaagaaaaattacagaaaacattgaatgaacgtataggacaatcctttgagatagtacgttcgcagctggagaatgtacaaaaaggattgggagagatgaagggtctggcacaggatgtaggtggattgaaaaaagttttaagtaatgtgaagacacggggtacattcggagaagtacaattaggtgccttattggatcagatgctgagtccggaacaatatgaggcgaatgtcaaaaccaagaaaaatgcaacggaatttgtggagttcgccattaaacttccgggaaaggaaaataataatgatactgtatatttacctgtggatgccaaatttcccaaagatgtatatgaacaatatcaggatgcatacgaagccggagatgccgcattgattgaaacttcatcccgtcaactggaaatcacaattaaaaaaatggcaaaggatattcacgataaatatgtagacccaccttttacaacagattttgccattatgtttctgccattcgaaaacatctatgcagaagtgatccgccggaccgcgttggtggaaatgttgcagaaagactggaagatagtggttacaggtcctaccaccctgggagctatcctgaatagtttgcaaatgggattccgtacgctggccattcaaaaacgaacaagcgaagtatggaatgtgttaggggcagtaaagaccgaattcggaaagtttggaggattgctggaaaaggtacagaaaaatctacagaatgcaggagaccagttagaggaagttatggggaaacgtactcgtgccatagaacgtaaattacgccaggtagaagcccttccggcagaagacagccaacgaatgttgagtttgcccgaactgactgatgatgaagacgatgaataaaaggaggatttcaatatgagcatgacgtgggattttattttgagattgtttgtggcaggcgctttgggtactgttattggtctggatagggaatatcgtgctaaagaagccggttaccgtacccattttctagtatcactgggaagtgctctcattatgattgtatcacaatatggttttatggaagtagtgaagatggaggggatagacttggacccgagtcgtgtggccgcacaggttgtcagtggtatcggttttattggagcgggtactattatttttcaaaaacaaatcgtgcgcggacttactaccgctgccggaatttgggctacttcgggcatcggtctggccattggagccggtatgtactggctgggaatctcagcaacaatccttacgctgattggtcttgaggcacttagctatctttttaaaagtataggtatgaaaagttccatggtagagttctctacagacaataaagaaacactgaaccgtatggccaagaaattcaattccaaggaatacaatattgtttcctatcaattggacgaaaagaggttgggagaagtaacaacctattatgttacaatggttataaaatctaagaaatacaatgatgaaggtatgttactgacattattacaagattttagcgatattaccgttcacaggttggagtaagcttttccggcttggttcaaaagcagcgggggagagctcttattgaaagattctctcccctgtgctgtgatcatgcttttaatcgcataacaaacatacttccttctcccagcttactgtctactgtaagagtaccattatgggcctcgacaaaatctcgggaaatagacaggcctaaaccgcttccttgtactttagttccgggaacccggaaataatggtcaaagatgcttttatgataacgtggatcaatccctttcccgaaatcccgtacaaacatctcaatgaatccatcatctgtttgacgtgcccctattaccacacgaccgttttccggtgaataccggatggcattggaaagaaggttggttagaacccaagctatcttctcactgtcgacaaacagtttacctattttgtcttcagggtattccacttctatttgaatattaaatttttcagcttgtacacgattagcctttattgcatattctatcaactctataggtttggttatcttaggcttcaactgtagttttcctgattctacctgggtcatattcagcaactcgccggtgatattaagcagccgttcgctattttctttgatactgtttgccaaatcttcctgttcttcatttaaagctccgatacgctggtcttctaataattgcagactcatcataatagccgagataggagtcttcaattcatgtgagattgtagagataaacgtagtcttggccgaatccagttccttaaattcggttatattcttcaacataatgacatatccttttttttccatagtaaccccatctttccccggttgggaaatactcatgtattttacttggaaaaaactctctttattgtccgcataaatcttcagaggttctttcttttctttttccttgtctctgactggttccccaggaatttccaccaattcacgaatcaggcgacgcaacaaatcattgcgcagggaaatatcctgtgcagagtgtttaataacttcttcacgcttcaggttgatcacattcaatgcttcatcattgatgaaaaggatttccatatcattatttaaaccaatgataggctcgttgatactgttgatgatagtctccatatattttttagatgccatcatatcggataaagcacttgcatgataatcttccagacgtttggccatgcggttgaaatttttagatacttcagaaaattcttcactattgcttaattccaaacgttttttataattatggttcgcaatttcctgtatagcgttggtcaattctttaataggattatcaatcgatgcaggaagacgcagccacataccaataccaatacatatacatgcggcaccaacaacatatatccacaataaagcccgctgtaatccgggacctgctgccggactgtcaggttccgtggcggtcaatatttgcaaattcacaacagaaagtacaaccaatagtacaatcattgccaccaatacccctatggcaagggttagtttcgactttatattcataacttttattttttatgcaagtataatcaaatctatgtctatttcagctaaagagtttagaaattttcgatatttggaaagactgaataatgcacctggcattttgaaagtaggatgccccatacagacggttgtaattccacgttgacgacaagttttaattatttctcccataatatcggaagatgaaacttggataacttcaccgcctaactcggtaaccagtttaaaatggttaagtaaatgccgctgtgttgccaatggaatacgttccgtactctcggcaggtgtctgtacatagagggcaaaaaagaccgtattgtaccgggaagcaagccgtgccgctttacggataatatgtcggggagtccgttcattactactgatacatgccaaaaacttctcgtgccggatgcccttttcacctgttacaatttcattttcaactttcttctcgactcgaaaggccacttcttttagtgccagttcacgtaactgaagaatattctctgtcttaaaaaaattattcagtgccaactgaatcttttcaggacgatagattttcccggctttcaaccggtttatcagttcttcggcggtaaggtctatatttaccacttcatccgcatcctgcagcaccttatccggaatccgttctttaacttctatacctgctataccttttacgtcctcattcaaactttctatatgctggatgttaactgcagaaattacgtttataccggcatccaacaattccattacatcttgccaacgtttctcattccggctgccctcgatattggtatgtgccaattcatctactataactagttcgggatgtaactgaagaatggcatcaagatccatttcttccacttccttacctttgtaaaatatctttttccgagagataacaggcaatccttccaacatagcaacggttcctgcacgtccgtgcgtttcaatataacctatctgtacatctaccccgttctccaacatttcgtgagcttcttgcagcatacgataactcttccctacaccggctatcattccgatatagattttaaactttccacgccgtgaacgtttaatcaaatctaaaaaatgctgtacactttcttctctgtcttccatttgttactttatcatattagtgtaaatataacaattttccgcatatttaatatcagtccttttataacagacaaagaatataccaataaaacaaacggcttagttacaatgccataagcgtgtcattaaaaactaaagcttaccaaaatgaaaaggaactctttcaaaatgaaacactttcttaatcactataattattgctgttagatcccctagaatagtttattcctgcttttctagcttgtgtatgttgaaattggcgggctattttatattcacgttctccttttagtaatctgtatccagtttgtttaaaccaaaagctaatattattttctatacattgccgacgaatgtccaatacccagtcataattacatatgcgcgcttctttacctgattctccacctaccacaatctgttctacccatgtaccaagttctcccttgaagtttatagcggacaacaatggttcacagataatgattttatgctttacaggagctgctttataaagaggaagacggtaatccactctttcttgattttccatggtgcaacaaatggtaacattatcatacccgtccccccaatccggaggcagacattggctgagccggtctatacgtttagttataaacaagaaatgaagatcgtatcgttcccgcatcattttccatgcttctatacgccattcatcggcttcttctatcagaaaatcagaggtaaaacaagtatagacgagatttccggaagggatcttgtaagtcttatcctttttccgcctcacgggcagattgaattgtccggttttggttattatggaactgtctttcccatgtttactatctccgcgatatacataacaatgccggcaacctgtacttagcttatggcagccatgccaaggattccatagagaagactccggacttattctattttccattctgtttgaataaaatttatcattttattattgtctgcaaagttagctaaagtcttttcatcatttacataattcattcctgaatttcttcaaaaagaatgggagtgttatagttaatgcaaatggattaatgtacctttgccgatataatcaattaagccactaacaagaataaattttataatgtagagtataaaacaaaaaacttattatatgaacacagacgatagaaaatgggagattattgaaagtgaatatcttatccgccgcccttggctgaccgcacgccgtgatcgggttaaattacctacaggagttgaaattcctgaatattatattttggaatatcctgattgggtaaatgtaattgctatcaccaaagagggtaaattcgtattagtacgccaataccgtcacggaataaaagaaacacgttatgaaatttgtgccggagtttgtgaaaccggagaagaacctttgctttctgcccaacgcgaattgtacgaagaaacagggtatggtaatggaaattggacaaaacttatgaccgtctctgcaaatgccagcaccatgacaaatatcactcattgttatctggctacggaggtagaacgaatctccacccagcatttggaagaaactgaagatttgacagtgcatttgctgagtgaagaagaaataaaagcgttgttattgaatgatgaagtaaaacaatcattgatggcagcaccgctttggaagtattttgctttatattctcattcatagttcaatcacccaaatacattttcagggaggattttgccctctctgaaaatgttttttggcttaaaggataaagtaatctagaaccactttgcccataaaatattggacttctccggagaattgattttgacaggttattctaaatgtcctaagttcaagcggataatgcaacaggagtgagaatgatgacaatgagaagatacgaaaagaataatttttcagaggaacagagaaagaagatttctttcccttttgttcccctgtggaaaagttgtttctttgcatcttccagttccccaacattcagttgcaatatgaaacagctaaccgaagaacaaaggtataacatttccgcttatctgcaaagcggaaagtcaagaaccgagattgccaatcttgtaggagttcatcgtagcactataagtcgtgaattacgtcgtaatagtgataaacgtaatggcatttacaaaccggatctcgctcaggctaagtatatgtccagaatgcgttcacgaaagcacttcgtgaagtttacggacgacttgaaaattcaagtagatatactcataaagaaagatttcagtccagaacaagtgactgggtttatgcgaacaaagggcttggaaacagtttctcatgagacaatctaccagtatatttgggaagataaaaagcatggagataagttgttatacaagcatttaagaagacggggaagaagtcataagaagagaggtgcattgactaatggacgtggttttatcaaaaaccgcgtggacatagacaagcgtcctacgatagtagacaagaaagtacgttttggtgatttggaaattgacacagtcattggaatgaatcacaaaggagcactattaactataaacgacagggtaactggactagtatggataagactacttagcgggaaagatgccagcccgctaactaaagctgccatcgatgccttggaaccttttagagaccaaatacatacaataacggcagataatggaaaagaatttagttttcacgaagaaattgcacgtaaactaaatatttttgtttactttgcaaaaccataccactcgtgggaaagaggagccaatgaaaacagcaatggtttgattaggcaatacttcccgaagggtacggactttagggacataaccaatgaacaggtaatgcgcgttcaaaacatcttaaactcaagaccgagaaaaagattgggttacatgaccccaaaggaaaaatataaattattaactaacaatgaattcgacactgttgcattgtctgtttgaattcaggtgtctttttatctgttccttatcatttcaacaaaggtaattgatttaacatttctttaattctgatagcaatccgtggcatcggttcggcaacggttagacctactatttctttttctttggcaatatcattaataacgcggaccacttctgccaatttcattccatcgggaactacccctacggctgctataatttcggcagggtcgagcacatccatatcaaaatgaattaacacgcgggatgctccacatgattttaaccattcatatatagcattactattttgtgctacatcttccggagtaagatgttttataccatattgtttctggcggacttttatttcatcacgttcccaatcacgcaatcctacgagcagaatctttgagggggctatttgggccggtagcttggaaaggatttccttgtcgcctttccccatgcaggcagtaacagccatggcatggaatccgctgtacatatctccgggaagtgttatatcaggatgggcatcaatccaaatcattgccacatcatctttatatttctctgcaaggtaggtaaacggaacgacactgacagaacattctcctccaagagttactattttatcaggatcactgatacacaacaagtcaagagcagctttagtctgtttcacaataatgtcgcggtctagtacaccgtccttttttctacgttctgtaatttctgttgaaatgggaactgtcagtgtttcttgactgctgtcgggagccaagaagttaagcaattctgcccctaagaagtatccctttgatgctgcttcgggatcttttatttcagtaatccaccgagcaatatcacctccttgccattgcggataaatcaaacgaattgtttttgttttcttttccatactttgattattaattgaatttttctgttgtgcattaatagaaatcacattaacagccagtaatattatcagagataaccactttttcattatatcattattatatatcccattattcctatatctgaatctgtctgcaaatttataattacccgatggtttgcgcaagtagggataaattaatcagtatatgaataatttatccctataacatgaaaagagtagaagctattctttccatgttatttcaatatgattaattttgcagaaaaaagaagatttatgtacagaaagaaaataccttttgatatagactgcggtgtgaaaatagcgatggaagtgattggtggaaaatggaaaagctgcattattcaagaattggacaaaggcccgaagcgcccgagtgaacttcatcgttactttgatgatgccagcccaagggtaatcaaccaacaactgaaagaactggagattcatggcatgatacagaaaaagattttttcggaacttcctccccatacagaatattccattacagagcaaggtagaacactgcttcccattattgaacaattagaaaaatggggagatggattccgaccgcaaatgaagaaaatattaggaatggaagactaagttcaacaagatatgattctttatcaattcggttttctgattgaaaatgaattactttgtcaattagaaaacgttttaaaaagagggtaattaaaactattatcataaaacaatttaaagccttatgggctgtaaaattccgttcattaaaacgcccacaagaatatgctttgctgctcaatgtctcatctgtttatctgaatgaggcggtgaaaaagacgactgggtataagtgcctatgtactgaaaagcgctttaatggaaatgcttgatatataaaaaagcgagtgcagatactccttgaacagaatgtctgcactacttgaatatgttttagaaggtcactttactcttctttccactaaccttgaaagggatttattttctttgctataaaaaatgcatatccatagtattctttatacttactatataattcagcttcatggcagatggatgccatcagtttttcagctgttttattccctgcatacttcttgataaacatttctttggctttggcctgcggaacataataatgttctgtccagcaattctccggaagaatgaacgtagcaacgggaatatatcccgctttttgtatttgtactactttattaggaattgtatctatttccgtgtaagcattcatccagaaatcatgaatctctgccggacggtgatcggtaaaccagacactttcagaaacggcaaggtatcctcccggtttcaaataattgcgccactcgttcaatcctcgttcaaaaccgatattataaatagctccttccgaccaaatcaagtctagggattctttttcaaaagaaagggcatccattgagccgactacaccttttactctatcttgtaaatttaacttttcggcattcctgttgaagcattcaataaattccggaaagaagtcgagtcctgtaatacttcccggtgtatgttgtgccaataccattgtctgacctcctgtcccacaaccgagatcggcgataagggattgaacagtgagattatttataaagcttagtgcttttaaggttgcttcgggacttccgggaccttgccggtttgtatttaaaaagaaatcacagattaaatttacgtcgaactcttggattgtattatgattattatcgttattcattattgtaaaacattgaggcatacaatcccattatttgtatgcggattaaaagatcaattataaataatataaaattgctctcaaaagacattctgagagtaaaaacgactggacaatctattctataaaaacagattgtttacgacaccaaatccgatatatgagtttttaacatattgcaaagatacatttattttattgaattgtaaatagattattcataaaaagaattattcttctgtccgattcattgaaagtgatagaaaataatgtttaaatttagtaaggatttgatcgtttccactcttttaaaaccctattttacgtttcaaataaatcatatcttttagtaaaaccccattgtcaatgataggatgatcgtaattctccgtgaaaaaatcttttatacaatgagaatattcaaaaccgcaacttttataaaatgcaagagtgccgggaacgtctcccgttcccaccatcatctgagtatattcttttgagtaatggtttatcaggtaatttattagttttctaccatatccttgtcgttgggcactaggggtaaccgctatattcttcaattcacaaattttcggaccttcttttgttacaacgcaaacagcttttatcccgttatcttccaatacaaacaagtcaccgcgctccaaatatcggtctatcattatttcctgttcatccccaagcaataataaatccagatattgctttttatttctagatattttaacgatgtgataatccataatattatatttatgacattcttgtctttattttcatagacagtacaaaatagcactattttaacgattcctggcatatcggtaaatagcagccgaaatatcagagatgatcttagtattcgtttccatattttcttttgagtctttgacaaatacggctactacgtatcggttcccatcaggtagaattacaaaaccaatgtcattgatgccaatgtattccccccgttcattcttatcggaagttcctgtcttatgtcctatcttgacttcactttcgggaaggggagcaggtagtctgtctttacctgtctcacactctatcataatatgttttagaaaatttgtatattcatttttcatggaatcttgagtcataaaaagttccaatagattggctgcttccattggtgttgtccagtttttgtaacaatcatccatgtcttgatgcatctcatcttcggtagtagttatagaaacatcgtttattcccaatgaatgaatgtattcatccaccacgtttacaccacctatataatcgaataaaatatcacaggctacattgtcacttaactgcattgtataagctaaaagttcactaatcggaagttccaaattaccttggggatatttatcacgcaaagggctgtatgtatccggtttgaaataccttttatcaagatatagggaagtggaaagtggaatatgccgtttttgcaggtaatcacatacagccaatgcctgatgaaacttataaacgctcatcatgggatatttttcggcattatttacggccagcgtatcttctccgtctagtatcagagccactcctatagttgctttcttatctttaataatatgtcgaatctctgtttttaacggttctaaagggtcttgggccttcctctgaatgcatccacacagtgctccacagaatatacagatatataagagttctttttttattaaagaactaaaagaagacatgggtttacaaatctttattatattcatagctcttcttaaatagtattttatcattctataactttcatatcatcatgtccggtcgcaggcaaccatacagtgaggatatcctccattttaattttcaaactacaagtattggtgcaagggtgacaacctatataagtcacattcatcaaacccttatctattaaaagctgtactcttttttctttatcataaataaggcttaatacactgacagcacccggataagtatgaagtaacctttccatgtcttctgcagaagcaaaagaaagatgtgggctgccgatttgccttgcaacattttttgccgatagcttcttatcggcaggaagcattaacataaaatattcttgccttttgttgcataagaacagatttttgcatgaagtactgcctagtttatatgctatttcacttccttctttcatcgttattataggagaatgttccagcttttcataaccgatgcctaaacggctcaataattcaaaaatggtattctgtacataacctttatccataactatgttctttatatctctatccatgctatattcttggatatatctacaaatataacaaaaaacagagaacaggaaatgctgtttctctgttttttgtttttcggcaaggcttttccttatttaaagattagccttttatcttcttctgcaaataacacagcagtatttaccagtgccagatgagaataagcttgtgggaaattacccaattgttcttttgtttcgaaatcaatatcttcactgaacagacccaaatggtttgaatattgcaaaatttcatcgaacagacagcgtgcttcgtttttttccccgatgacataaagtgcacggatcagccagaaagtacagatggtaaaggccgaagaaggacagccaaaatcatcatgagtattataacggtacatcaaccctttgtgtaacagggatttcttgacggctttcactgttttatgataacgaatatcatcagcatctataaatccataaggttccattaacagtaaagaagaatccaaatccagattgccgtatgcttgtgaaaaactttgtatttcttccttccagccgtttctcataacatcagctttaattgcatcagcttcttcttcccaacgtcggctattctcatatttattcagaatacgagctatgcgggctcctctgtccaaagcaacccaacacatcactttggacgaaacgaaatgctgtccttcaccccgtatctcccaaattcctttatcaggctttctccaatcttccaccacagtcatcataatgcttttcaccatttcccacatatcttctatttcatccaatgtacctggcatcaaccggtaatattggtaaatcaaatccatcaaatagccgaacgaatcattctgcctttgatgataagcatcattgccgatacgcaccggtttggagtttttatatcctgaaagatggtcgagtataacttcagtcaatttcctttccccacgaatgccatacattatttgataagtgtcatgctcggcaacaaaagtagattgtatgaatttcatgaatttgcgggctgcatcggcatgacctattttgaaaagggtctctatggacatggaggcatctcgcaaccaacaaaaacggtaatcccaattgcgtacttctcccacagcttcgggcaggctggtagtaagagaggctaataccgcgccattataaaaggacatcatcttcagggtgagtaagctacgctctattatatcgttgtaaatagtgaactttcttgtacgatccgtccagttcaaccaataaaccaacgtgcggcaatactccagtttctcacgctctatatcaacaggaatcaccttttcattgtatgaaagaagaaaaaattcatctttctctaatataaattcctgatggtttacaataccttgcaacggcaaagaggaatacagatattgtctgtccttgttgttagaagaagaataggtttcaatataccgggaagttacattaaaaaacgcttttccacgagcataatcgggagccggatggtaattgactttaatgcgaggacgacctttaatccagcggatataacgatagacctcagctggacgataatattccttattatcatataactcataacaaggcataaagtcgactaccgcaaattcgtcttgttctgacacaaaagtagtggaaagaatattggtatggggaacatacgattggatggtgtgatagtcttctgaaacttcaaaaccaaaagtcccgcctttttcacgatctagaagagctgcaaaaatagaaggtgaatcaaaatttggaaaacatagccattcaatacttcctttttcggaaatcagtgcggctgtgcagcaattaccgattacaccgtaattcaaattatccatggttattttttttgtaatgttagtggtttattatccgtttaaaaaaatctatagccgatgataactgccctttcaaaccacttttcaaggctgctttcaccatgctttcatctgtcagccgttgtaaaaacggcaaggtgtctgtctgtacgggcagattgtaacgtgcactctcggatgctgtaccaatctttacagtcacagcagtaacaggtacggctttaaacatatcatcatccgtagtatcatctcctattgccaagataaaatcatatcgggtggcaagcaaaagcctgtttacttctgaacctttggtaaattcgggagattttatttctattaccttattaccctgcatgatttgcaaattctgtttcaagcaaatagatatcaaggaattgaccaactgttgcgcacgtaatctgcccaaccatgcatcggcctcacgataatgccaggcaagtgccgtttctttgacttcaagatgggagcgaggagtcttgctgacaaataattttaatatagaaagcaatccggggctccattcctgcccgtgtacattcttgtgccatacaccattctctttataaaaggccccatgttcggctgcaaaggaaagaggcagtgcacccaaccacttctctaaagtaaaatggtcacgtccgctgtttattaccacatgattcaaggggtcggcggtcagtttctgcaatgtatccagcaattgtggagtaggagaggcatcttccggccttttctgaaaagggaccagtgtcccgtcataatccaacaaaatcaaacgctttttagcatgtaagtattgatgctgaatttcctgcatattctgtgatcctatcttcttaaaaagcatggttttgtttttgtgtgccacttcctgccattcatttacaaaatcggcagcccatttattgacagtctgtacggatacaatagactgcatacggtgcatccgttctttctgttcttcaaacggcatttccaatgcccggcaaatggcattttctatctgctccgtatcattgggattaaccagcaaggcgtcggtcagttccacagcggcaccagccatttcacttaaaaccaatacaccgggattgtcttgcttgacagcaacatactctttggcaaccaagttcattccgtcacgcaaaggagttactaatgcaatatcagctataaaatacatagcagccaattcttcgaatgaaaaaccatgataaaaatagcagaccggagtccagttcattgtagaatatcgtccgttgatagaacctatttcctcgtcaatccgggttttcaattcggcataactgcctacatgatcacgtgaaggaactatgaccatagccagtgttaccttgccatgatattcgggatggtgttccaaaaaagaggcaaatccataaaggcggtgcaaaatacctttactataatccaaacggtctaccgataggataagtttatgtttgccaaacaagagacgggttcgttctatagccttccaaacatttttttgttgtgacacattgtggtaaaggtcataatttatccccatcggaagtgcatcaacgcgcacaatgcgactgcctatccgggtttcatccaaactgaaatctatatggagtacccgttcggccgcactgatgaaatgacgcatatagtcatgtgtatgaaatgcgataaaatcggctcctaacaatcctttcagtatttcggcacgttcaggtagaattcggaataactcataagatggaaacggaatatgatggaaataaccgatatgcaactggggaagctcttggcgaagcatttccggaagtaacatcaactgataatcttgtacccagacccaatcatccggttccacaaggcggataatttcccgacaaaacaaagcgttaacctcttggtaagattgccagaaactttttctatataatgtataggcaaagaaatagtgacataaaggccacagggtactgttactgtatccctcataatagttcttatattgctcatcggataaaaatatgggatggagattcatttcctccaaccggtgacagatatcctgtttttcttcctctttgtctgtacagattccgggccaccccacccaatgtttctcgtaattgccctgtagggaatttagtcccgttgtcagacctccttcactacgtgagaaaacaaaggtatctttttctgcgacagccttcacgggcagtctgtttgatatgatatacaatttcatttttatataattctttttttcaattagatgacaaaagtcataccactaatttaaacatcttattatcaacatgatatatgtttattgattagtttatactttttcaatatgaaagccttttttctaaaatgggaaatgaaatagctgaaagataaaagtgcaatttttgtaatggcatcgattttgatttatatggagtataacgctatcaacttatagaaaaggtagcgagcaaacaataagaaataactgattaacaaactaataaagatgaaactagtaaaaacatagctttccaatatggaaatttgcctgttaaaatgaaaaagaaactccaaaagaataaaatgcaataaaaaaatgaaagtatataatttagaaaatattaaatctgccaccgaactgaaacattggactgaagtaattaacatgaacgaacgttctattatagtgctcgacacttttaccagcattgcccaaaagctgcaagctgtttctatttctttattccatgtcgatatcgaagaggttatgagtcaattgcaggattttgagaatgattgtagaaattggctggacaatcttctttcctccgaaatacagaaagcagaagctgccaaagaaataaaagtacacatcgatcaaatttcccgtttatgtaatgaaaatctgaacatcattgacgatcatgagatcatggctcacggagcaatgatatcctctcttattctgtcacattatttagaagaatgtacaaaaaagaacttcatcttgaactcatgtcatttcatgcgactagggcttgatcgaaaaccggatataaagtatgtgaaaaagaatgtagaagaactgatgaaagactgtcccgatgttcacattcttattacccaaagccgtttgtgtaaaaatgtatatgatgaagtggatttcttcccacaaataggaaatgagtattatgccactgttatcggggctgtattccatgcggatgaaattataacatccttacattctgatgaaatttgtttccgaggtatggaacatactcgaactcttacatacggtgaagccgagaattttattgatagcggcattgcattgcttcatccggaatgtattccgctggcgcgcaccgccggtatggctattgtattgataaaaacaccgaaagatacattacgaatatcatcagaaaaaacaggaacaaaagtaaaagctgctgtttcacgcagaggtgtggtctttgtcaaacttcgttcgttggggattcttacttcttatctatttattggaaaagtatttgatgtgttcgagaaatataaggttcctgtctatttagcgacttcctctaatgtaagtgtttcattggctgtgaaatgtagcaacgacacattacgcctgatatatcgtgaattacataagtatgcggaaataggaatggaaacagaaatgtctgtggtcagcgttattggagatctaaattgggaaaagcatacagggttggaagccagaattatagaaacactgaaagaaatgccggtatgcatgatttcatacggtagcagcactcacaatctttcagtgctggtacgggaacaagatagagaaaaggcattagtgacactgtgcaaagcctttctagatattccatcagagaaatttgatgtaataaagcaaactcaattacaagactcttttgttatgtgaccttcctgagtaaacagaagcaacaattcgtccgacaaggtatttgttgcttttgtttttgattaaataaaacattattttatccttatagcgatttgtactttattgccaattctatcacctaaattgttatccatacaaaaatctgacttatgaatttaatagaattctttcccttataaacaaaaatagacatatagttgattatcagtcctgaataaccttttaaaatagttgctgttatccattcttaactttagcacagaacaggaaataataaaatggatttaaagcaaacaaagaacatctctgttaaaatactttttgtatatttgatgtagtctgaaggtatttaattgactacaaatagattaaaagaaactcgcatgagaataggcaacggataagaaattggtaaagtgctttgatacactatatttctcatgctgtcaaacaactcttatttgtttgcaaatataatattattgcaggtaaaaatcaaaaataacgaggtttattttcatttttgcctgctgatatttgttccggattgtcggatgcgatatatttgtaattaggattcgtaccgtgttccaagcggttcataagtaacgacttgcggagctttggcaacaaggggatgcggctccgttttatagaaatgacttatgcaaaccgacttatccatttacaacagtcttcgcccttcctttatagaaggcgttcacgccgtgaagttcaatgctttgtcggcggtcatatcgcgttaccgggattatgcccgcagttccgaacaaataaaagcgtactcgggagattctcttctgatgcgggacattgcctccttgcttgacgaagcaccccgtcccataacgggggaataccaggatttcaccccgttcctgcttcttctgatgctttcggaggagtttcatgccgtccattacgtcgagcgtcttgtaacgtggtatttcggctactgttgtgtcgatgaactgcggacggtctgcaccattctgttccagtgttcctacccgcatcacgacacgctgcggctgcggtttaagaattacctgcgtgaagcccgtaagacattgggtatgcccgttgaatgtaacgctgctgtcatgctgaaaatgctcgacgcctcttatgaacatctcactcccgccgatgtcggggagttcgaggagctgttgcacctgggggacgattacgagttcatctcccgtgtcaaatcgaattatcttgcctcggataacgtcacggaactcgccggggtttgcgggtattccagcacgattaccttccgccggcgtttccagcgggttttcggctgctcggcctcctcgtggttacgtcagcgccgtatcgaacgtatcggggagttgctgcggacgacacactacacgttgcaggaaatagcctacatgtgcggtttctccgcccaatcccactttacggacttttgcaagcggaatatggggagcaatcccacttccatccgccaggaaggccggatctgacattaaaatcggcctcgtgataaaaaaacgaagagaaagataaaaatcgtaatccgccggtttttcgattcgctaactttatacgcgaaagtaacaagacggattatgattgcatttatagaaaaattaaacagcgaagtcctgcggagtatcgaacgtatcgaatcgcgggataccgacgtgttgaaaaagtcgcttgaagcgtcacgtgtcctgggagaagcgttcgaccgtttgaaacaatatatcatcggctaccgttttcaaaacgatgacgaggaaataaagttcttcaaagaaatcaaaccccgtcttttttgccgtctgatctattaccgcaagctctacaatatcgagatgaaccgtccggtaggaagtatcgaggcacaacgggagtacctggacgcccatgttcgggccatcaacgcgtacacgcagaaacgccttgactttatccgctatttccgcagcggcgctacacacctggacagcctctatttcctgcgcgggcagaccgacacggagcaatacctggaaaccttctactatgaactcgacccgcagttttcgacaaacgcggatttcaaggtggcgaaaatcctggccaacgatatgttgtcggtttatcttatgggcgaattggaatcactggagagcacgaacctccggaacatggttctgccattgtctgacgtgcgtccgacatggcaggactcgaagacggatctgacggaacttatttacctgctcgacagtaaaggctgtttcggcaatgtgccactcacgcaacttgccagctacatttccaacgctttcaacgtacacctcgacatgaacctttcgaggacattctgcgatatgaaaatccgaaacaacccgacaccgtggcttgacaaggcgaaagaggccctgcttaaacgtatgcagacgtggaagcgaaacaagaaaaacggcaattccgagtagaatatgaaccggtaaagcactctattccttatagaaacactgataatcagcgttgtatataacaaaagaaccgaggtcggttttcccccgtaactctcgaaaggaactttcccgaacgcccgtatttgcacccgtataaggagccgatacgggtgttccgttgtagccccgtccggattagaacaccgttaagcgttgaatcacagtattctatcgcatttctgcccataaaaataccgagtacgggccgcggatttcggtaaaaaacactgccttcttcaccgcatgaaccgttgagaatcagttcactgcaaattatcaaaaaaaagtcgtaccgacctcgttttaagctgtccatataagcccgacctttgtaacagactaaaaaacaaaggagtatgaaaatcatagtgatcggttcgcgagcctataacgagcttgtcgggcgtatagagaaaatagaggctgcaatcgcctctctccctgaaaaggggcgtgcatggaataaggagtatataaacgacgaatggatggacggcgagcaggtctgccgttacctgggtatcagcgggcgtacccttcaacgcctccgctcggatcacgtgatcacctattcggccatcaaccggaagctgtattattccctcacggaaatccgccgtgtgctgaaggagcgttccgtgcggcgcaagaaccaaccaaaggagtaggccatgtttctggacaaggaatatttcgacggatggatgcagcggctctcggaacggctggaacgtatcgagaagctgtgcgcgggggacgtggagcaaccgctttccatcctgcctgacggggagcgtcttctggacaattacgacctgtgccgtatgctcaatatcagcaagcgcacactccagcgttaccgcacctcgggagagctgccttacgagatgatctatcacaagaccttctaccgggaatcggacgtcctgcggttcatcgagcgtaacttcagtaatttccgcaagctgaaaaaggatcgtcctgccggttccggttaggccctgtcccgagagtccggcgtcatggaaaaacgcggagatacatggaataaggcacgacaaggcggtacaaccgctcgatatttgccgtaaaatcagtatgtttgctgaatgaagcctatataataatgaagcaatgaaagaaactgataaaatatatcctgccgacaaaggggaggaagagctgctgcataatgtgcgccatatcttgcaggaagcgcgcgcgaaggtgatacatcatgtcaattcgaccctcgtgagggcttactggcaggtagggaaatacatagtggagtacgagcagcagggaaccgaccgtgccggatatggcaaggctgtcatcaacaccctttccaggcggctcgtggcggagttcggaaacgggttcacggccaccaacctgcggtacatgaggcagttttaccagtgctacccgaaatatcacacgctgtgtgataaattgagctggtcgcattgccgcacgcttctcaaggtgtcgggcgatgccgcccgtgatttttacctgcacgagtgcgtcaaggaaaactggagtgtccggcagctcgaccgccaaatcaacacgcttttctatgaccgcctgctggccagccgagacaagaaagctgtgaaagaggagatttcccgtaccgaacccggacgtgtcgaacccaaagagatcatccgcgacccgtatatcctggagtttctcggtatcccgcagggagagcattttctggaaaccgatctggagcaactgctcatcagccgcttgcagcgcttgatgctcgaactcgggaaaggcttcgccttcgtcgcgcgacagaagcgtatctccttcgatgacaagcatttctacatcgacctggtcttttacaattacctggcccgttgtttcgttttaatagaccttaaatccggggagctgacccatcaggatttggggcagatgcagatgtatgtcaattactacacccgtgagttgatgaatcccggggataaccctccggtgggtatcgtcctctgcgcggagaaaaacgacgcggtcgtccgttatacgctgcccgaagatgaaaagcaggtcttcgccgcccagtacatgacctatcttcccacgcaggaggagctgcaaacactcttgcaggaagtgtgacgacaacgctcacggacatatgaaaaaagccgatggaaatctgtacttccgtcggcttttcgtttacatcttgatccctttcttcgcagggccgttctccggcgggctgcccacgcccgcgatcacgatgcgccccccggaggcgtcggcaatctgccgcagccgggaaggaatacgggccgccgtgttgtcttccttcgggagctcttccgccgtgtcatgccgttcccggcacacgtcgttatcctcctccgcctcctttccctcgctctcttctatcggtttgaggctttgctgtatcctgcggtctatttccgtcaggtcagcttttagggccgtcagttcgggctccttgcgccaggaactttccaccacttcccgcaggacgggaatatctttctccagttcctcattctttttccggaatttctccagtgtcggctcgatggtcgcgagcgcgtggatgaagttcatcgccgccagtcgcgggtcggaggcgatattcccgtagttatactggtatagataatccccttcaccccggacataaaaacggttctgcaccaggtcgagcccgtctttcccggtcgtttcgctctggacgagcagctcgaacccgtagaggctcccgatgggttcgagcctgtcgagcgtgcgtgccgtttcggcgatatggttgagctgtttcccgatgagcttggggtcggaggtttccagcccgttcagtttcacgggattgcggtacgagccgtcctcgttgaactcgacgcgggccttgaagtgttccagatccttgccgatacgccgtatcaggtcgttgttcttctctatcttctccgtgatctgctccagcttgtagcggctcgatgatttgccgcgcacgaatgcctggcgttcgctttcgagcgtggcaatcttcttctccaggcgggctttgtccagcaggtctgtatttcccgagaggacggcgacatactcggaaaaattcatgccgctcttttcgtcgatggccccctcgtcgatggtacggcttcccatgttgttggtcttgagctggcggatgaacagttgcttgttgtgcaacagcccgaacttgtaggcgtcgagcgacttctcgacggcgtataatatcacgtccaccttgttgtcggcatggagtttggcgatctcgttcccggtgcgtattccccgcccgtcgcgctgctccaggtcgctgggacgccaggggcagtccaggtggtgtatcgccacgcagcgtttctgcgcgttcactcccgtcccgagcatctcggtcgatccgaagagtacgcggatttttccggtgttcataccggcgatcatctccttgcgcgctttttccgaggtcgcctcctggatgaaccgcacctcgctttggggtatgccgtaatcctccgcgagtttacgccgtatctcggaatagacgttccaccccgctccgggtttgtaggttcccaggtcggagaatacgaactgcgtacctttgtacgcctcgaaacggcggtagtaaccggcaatcatacgggcgcagtggctcgccttgttgtccacgtggtcgctgtatagttcggggtctatcatacgcatatcgagcgacatcttgcgggcgtagtctgtggcaatgagcattttcgccttttcctcccgctccgagagcggcaggcggcccaggagcgtggcatcgcccgatttggcgaactgcaccagtcgttctatgaactccgtctgctggggtgtcggcgggatattgtgcaatatctcgttcttttgcggtcggtcgatccctatatcctccgccgagcggtaatctgtaatctcggagtagaacatggccagttcgggaaccttgatgaaatatcggaaccgttctttctgcacgacctcgttggtcacggaaaactcgtagtcgatggttttcttggcaaatatggccgcccaggcatcgaaggtgcggatattctgacgctccagctccttcgggcgcaggtacttgaaaagcaggtacagttccgtgagcgagttggagatggtcgttcccgagaggaacgtcgcccccaggtcgcggcccgtgcgctgctgtatggtacgcagcgcgaaaagcatgttgagcgcccgctgcgacccctcgggatttccgaggcccgccacccggtcatgccgggtcgtgaaagtcaggttcttgaatttatggctctcgtccacgtagaggtggtcgatacccatgaggcggaagtccacggcgtcgtccttgcgtgtttccagcgcgtgcgccaccttctgcaacttggcttccaggttggccttgcgtttctgacaccctttcatcatggcgcgggaaacgtccctgccttgtgctttgagcacttcgaggttctcctccacacagtccagctcggcctgcaatatctcctgctgtatctccggagactggggtatcatgccgaactgttcgtgcgagaggatcacggcgtcccagtcgttgttgcgtatctcccggaagatgcgctcacgcttccggggcgtgaaatcctccttgcccgggtagaggactttggccatcgggtaagcggtacagaacgtccgggctatttcatggatgttggctttcagcccgataatcatgggtttattggccagcccgaggcgtttcttctcgtaggccccgcagcacatgatgagggtctttccgccgcccacctcgtggtcgattatcccgccgccgagcagtttgtccatccatatcgcgtccttctggctgtcatacagattgtctattcccagccccttgaggtcgaggtcggggaattcctggtgcgtcccgtcgtacttcgggcgcacgtaacagttgaaagtacggttatagaggtctgtcaggcggtctttgaagtcggacgactgctcgcgcagccattcggggaaagcaccccggatctcgtctatcttgctgttggcgagctgtatggcctccccgtcacgcactttgacctcccgccgttcgccgtccacccatttgaggacggtcttggtgatgtcgggcgaagtgttttgcagggcgtgtttcaaaaggtgcaggccgttgtacttacgggtctgcgcgctgacggcatactgctccgtgatcttcacgttcgtcgcttccgccttcacgccgtactcgtccaggttggaggcgaaggtgatcttcacctccgtatcgaagagcgaggaggcgaaacgctcgtaaacaccttttggaatccaccgttcgcccaggttgaagtccaggtcgtcgaaagcgatgggtttgggcgtcgcctcgcgcagagcctccagcgattcccgggccggggcgtggtcgggattctcccgcaggaacgcctcgatccgttcggctttcccgatgacattgccggcgatgaacttgtcggcaacctcgtagccgtccgtttccgggttgtaatagatacgtcctttcagttccccgagtattccctccacggtagttcccgtgagcgaggccatgtagtgcggttccacccggccgtacttgttcaggctggccacaagggcctccgaagcgtcgtcggcgtgcgtgatctcatcgggattgaaggccacgggacgctcgaagatgtcggctttgcgtgccttgccgtcgatgtaacgctccagcgatagaatctccgtcccccgcgcgtccatcttgatcaggtcgaggttgcgtttgtcattgagccgtccgaagcgttcggtgaaattgtcgtaaagccggttgagcatctcccgcagggcggggttcgccgtcagcgtttccgcctcgttgttataaaggtggtaataggcatcgcgtatctcgatatacatggaggctttcgtccgttgtgcaggcgtgagttccagcgggtggaacatgggttgcagggattcagtctcccgcaggtagccgacccggttttgtccgtccgtgacgagtgttccctcgcggaaatagggggcgacctccccctcgaacggtcggggtttcatatccgcctcccgtatctgcggcatttctttaccgggttcttcctcctctggattgtccggcgtgtcgaacaggccgcccgttctcggcgtaccggcggcttgtttccgtttgcctttcggggcttccgtcggggggcgtaccgcctgccgttcccgctgttccggggtttcctgctgccgggcgctttgtcggcgcaattccgccctccgttccggggtaagcgacatcatcatctcgtaaaagccgttgatcggcgggttgtcctcccagttcagggaggcatacaagtcttcgggatcacgctccggtggcgtcgttttcggcatttcgctcttctgttcctccggagaggaggccggggcgaataatgagggttgtcggggcgtcttccgctttgctccccggcggctgttccttttcttggatataccgagttctgcctgccgccgctcctcggcgctgaagccgaacagatcgtagagcgtcagcaacggttcctgctgcacatttaccggttcggcagcttgggtggcaggtacgggagccgccgtttccaccgtgtcgaaaagcgacccggcgaagccctcccgcggtttcggttccgttattccgcccacgtgctgcacgggagtatctgccatgccgaaatcttcgggtttcggcgggtgctgctcccacaagcgattctcccgctctttcgaccaggccccgaagtcggccagatcctccccggtcggttctccggcgggtgtggcagcagaatccggtaacacttgtccgggtttgttttcgattcgggtaatctccccggtttcggtatcgacatggtagccctgtgccgccatttcggcgacgacgcggcgtttttcctcctcttcccgctgctgctgaaggttacgggcatcggcgataatctccttgacgatttctccggcaaggcggggctcgtgtctttcggcacgctggcgttccgcctgacggggacgggacaattcccgctccggtgtaccgggtgtctgttccggagcatgttccaggcaataactctcgttgaaatgccggttgaaatcctctgagagcatacgccgcatctcccggtcgatgccgtccacgccctccgcgtgggtgaactccatcgccggtttgccgtaggggtctttgcctactttggcctcggtatggatcaccctgtcgaacgactggaaaaggttgtttatccggatgccgttcgacagcttgcgggattcgatgaaatcccgctgccgttcggacagttcccccgtggcggctttcttttgcaggataaccaggtcgctgccgacctccgtccccgcgtgttctgtaaagaggttgttcggcagccggatggccgatacgggctcgcagcggttcatcagccactcgcgcacggggcgtccctgctcggcgttcaatactccctgcgaggtgatgaatgccaccaggccgccctcgcgtaccatatcgacggacttcatgaaaaaatagttgtgcagcgcccgtgtgccttgccgccgcacggggtcggtatgggtggagaagaacgggtcgaagagcgccacgtccccgaaagggatgttgctcacggccacgtcgtagtaaccggcgtatttgggttcgatacgttcgaatccctgtacccgcacccgtttttcggggtgcaggtgcttcaggatcaaccccgtggcggggtctttctcgaagcaggtgatctccgcgtaggggtcgtggaaatccacggcattgacgaaaacccccgttcccgcgctggggtcaagaatacgttggggggcgatccgcgtatcccatatcgcctccacgatggcgtctgccactttcgggggcgtgtaaaaagccgtcaggacggagttcttgatcccgtccatgtagcgcttgtatttccgttcgtcgggggtgttcgccctgatgacctcttgcaactcggccacgagcgttgccatgccgtccttgtccggtttcccggtggggttttccagcacttccttgatggcgccgaagccgctgtatgcgccgagtgtcctttcttcttcgggagtcggcgcccgccgttccctgtcgagcgtgaaggccgtcttcagcgcgtcgatattctggcggaggtgggttttcttattgaatgccatcttcgagaagtatttggacggttcccgtcagttcggtatagaacagttcatagtcgggcgtgtcggcgaagtcgtccgtgaggtcgtacttctccagcaccccgcggcagaggggcagcaggcgtagagccgcctgccgggcggtatcctcgggaatctccgcctcgaattccctccagaggatgtttaccagcgtgttgtagggtgaaaagtgcagtccgcggcagagttcctcgcgggcaatttcttcggcctcgatgtggttgcagcccgaacggatcgcctcgctgtacgcttgggcggcgctgtcggcccgctcggcgatgaactcactttcggcgatgagttccgggtggctgtccttgaggtaggatagtaacgaaagtccgtaataggacaattcccccgtgggggtatggtgttgcttgtctggcatgataagaatttttagtggtcgttgataatcggggaagagaaaggcgccccgggttcccacccgaagcgccgaccactgaaaaaatccttatcaaacaagcgtatctcgttatgacaggtcttttccagtggcaaaggtaacgattatttccgtttgttcctctttccctgcctgggagtatcgcgcggttcgaaaacgaacgaggtcttgaactggtcatcgagcgtgagggccgcgtcgaacgttccgccgccgtttttgacgaatccccggatcgtgccggttttgcctttggtcagcagttccgcgagctgcttgtcggtcagctccttgcggcccacggttctccatacggtcaggccgcaatcgggattctgacacttggcgagtttgggatagaacaccacgggcctgccgcaacgcgggcaggctgtgtcactctccgcgccgtcgattcttgcttccagcagttctttggcgatttgcgaggtgaagacctcgataccgcgatggaacgtcggggcgtccatctccccggtggcgatcttcgagagggccagttcccagccgcccgtcatggcgacatcggcaatcttcttgtccctgaccacggcatacacggccagtcccttgtccgtgggtacaagcgactttttctctcgcctgacatactcgcgggcaaagagcgtttcgatgatggcggcacgggtggcgggcgtgccgatgccggcatccttcatcgcctcgcgttcggcctcgtcggacagttcgcgtccggcggtttccatcgccgccagcaggctcgattccgtgtgaagggggcgcggccgggtctgtttctgttccgtgacgcatcccttgacgggcagctcgtcgccttgcacgatgtcgggaaggagggtcatgtcctcctctttctcctcgacaggttcattcaggacggcccgccagcccgtctcgaccatgatactgccgcgggccgtgaaatcatgtcccgcgctttgcagggtaagggaagtgttttctttcacgcaggccccggaaaaggtttcgagcatccgccccgcgaccatctcatagacgatgcggtggtcggcatccagttcggaagggaggttctcggtgggaagcagcgcgtggtggtcggcgatctttttgttgtccacgcttcggcgggagagagatgcggtatccatcctgcccgcgtattccgcgaaacggggatagcgtgtcatgttcccgatgagtgccggaatctcctcggccacatcttccgatatatagcgtgagccggtacggggataagtgatgaacttcttctcgtaaagcgactgggcgatgtcgagcgttttttctgccgaaaaaccataccgactgttggcctctttctggagtgtcgtcaggtcgtacaagagaggcggctgttccctggcctccttgcgctccacgttcacgacgcgtaccgttcgggcgccgataacctcggcgcgggctgcttccgccttctccctgccgtcgaatttctccgtggagaggacggtgaactccgtgccctcctttgccgtggagagcttcagccggaaataggcggcgggcttgaacgccttgttctccaggtaacgggagcagatgatcgccagcgtgggggtctgcacccgtccgagcgaccagacaccccgcccggcagccacggcaagcgcttgcgaggcgttgataccgacgatccagtcggcttcgctgcgggctttggccgagaggtagaggttgtcgtattcgttgccggggcggaggtgttgtaacccctcgcgaatggcccggtcggtcaggctgctgatccataaccgcacgaaaggggtgcggcattccaggtaagagtagatgtagcggaagatcagctccccttcacgccccgcgtcggtcgcgacgatgatgcgctcggccatgccgaacaattcccggagaataccgagctgcttcacgacacccgggtcggccttatactctttaccctcccgaacctgccggggcaggaggatgaacgatgatggcaggataggcaggttttcccggcggaaacccgcgatgccgtactgttggggcattgccagcccgaccaggtggccgaaggcccaggttacggcgtagccgtttccctcgataaaaccgtctttacggttcgtggctcccacgatggcggcgatctcacgcgccaccgagggcttttctgcgataattacttgcatgatgattcggatttttcagtggttgttttcttgttgttcttcttctttctctttttccggacgggcgatcagccggcggtcgtaatagacatggttgccgttcccgtcgtaatacagccgtccgtcgtccgccttctccggggggctgcgtttacccggccggaggtacaaggcagccagcgccgcgatcaggagcggcatggctccggcctgcatgtagaaccatttcatacgttataccttggcacctttggagttgctctttttgctgctgcggtaatttttcttctgcgccggggtggcctcctgctgtccctgcttgagcggctctttcacacctttgaccgcttcgacggtcttgccctcggaattgacggcgacctgggtacggctttcaacggcgggtttgacctccgccccctgccgtttcgcacggtcgggattccagcggaagaagtccatcttgttacgctcgaagttgggcttgacccaggcgttgaacggctcaccctgcccgtccttgaccatgcccttgatgtagaaagccttgacatccgcccgcttggagggatcattcaccgcttccgtccactggtcataagcctctttgggcacggaggctttgaggattgtccggtgaatcgtgagcgtgggctgtcgttcggaggccgtagtttcctgccgtccgtttttctcggcggccttctgacggtaaatctccttgttctcctgggcgtagcggttgcgatccaaaccgtcgtaggtaaaggaatagttacgttcggccgcgtcgatttggatataggcatcccgcttataacccgcgcgggtggtatatccttcgagcaacaccttgccgccgccgtagaaatccatctgcttgccttccgagaggtcggcctccttgatgcgggcacgtttttcgagtaacgaaacgggcatgggttccagcgtgttcgtccatttgtctatcgacacgtagcagggcgtgagcttgcccggctccagctccaggtcgatcactttcccggcgtggcgggtgttcatcaggttcgttttcgcctcctcgtcgagcagcaccccgtggaagggggcgtcgaggtcgggccgttcctgccagtaatgcggcacgacgcgcagcgagccgtccgcctgctcttcgagcgacacgcgccctttggtggaaacacgcatcccgttctccagttcggggttcatctccaccagcccgttggatttatgtccgtaagacatggctttcaggtgcggctcgatgtcctccatgcggatacctttcttctccatatccgccaggtctatcttcgtgacgtccagcggctcgaactgccgctgctcctgcgtctggagccgttcggaggggtcgatacggtaattttccagaatctccgggtcgaagtcgatgcggataagtttgttcagggcattctccgtcatgacgaagatacccgtgtggacggggttctgggcctgttccatgaactttttgaagaaggcttcgagggctgaatcctgcgtgttcacgttcagcaggctcgccacgttctgatccgtggggtcggcggtctggatattgccgtcctgatccacgccggtaacggcttgtagtcgtccgtcgtcggcattctgaacgagcatgacttgtttagcgtcgttctttacgttttcgtccataattacgagtgtttttagttagcaccaatagcgatgcgggaacgaaagtaaggggaaccggctgaacgtaaaagagttggaaaggctatggaagcatcgggcacagaagtggccgcttgtggcgcagggcagaggaaatcggagaaacggagtgccgggaaggacggatttggcagagggtattttcgtggctcctcaccttatttgtcaggtagtcgggatctattgttaaatgtcaataaagcgcatggataacccgtgtttttttataaatttgcgaaaacgggtttcaatatccgacaaaacgtgaggcatggaaatatataccccaaaaaccaagatcaaactttctccggtgataagaaacgggagagaatttgtcgaagtgactttcggtaatgacaatgacatccgcttgtcgctgtcgaaggaagaaaacgtactgcttgtcggcggcagggcttatctgccggcagaagatttcgtgcttgccgagttcttcgaccgctatgtaaaaatggcgtttatagactattctgccatcaaggaaaccgcaccccgtaaagaggaagacaaacggccgccactgccggaaggctatctggaaaaacttcagcaagtgcgttacagtgaccataccgtaagggtatatacctcctatttccgcgatttccaacagcatttcgaggggcgtaagattgaaacggttactcccggcgagataaacgactacctgctgtatctcatccacgagaaaaacatatcctcctgccagcaaaaccagcgtatcaacgccatcaagttctattacgagaaagttctcggtcaggaacggcggtgttacaaggtgaaccgtgccaaacgggagaagacgctgcccgacgtgttgagcaaggaggaaataaagaaaatactcgacgtgacggtgacagacctgcgtttcttctgtatgttctccatactctattccgcagggttgcgcatcagcgaactgctggaactgaaacccggcgacatcaacgaatcccgctccctgatacgggtgcggcagggtaaagggaaaaaagaccgctacaccctgctgtcaagaccgttgatgaaaaagctgacggaatataacagactatacaaaccgaaagtgtggctttttgaacacagaccgggagaacctttcaccgagagtatcgtgtcgaaacggctgaaggcagcggcccgggaagcgggaatcacgaaacggatttatccgcacctgctgcgccattcgttcgccactcacctgctggagcagggaaccgacatcaagatagtgaaagagcttatgggacataacaatatcaagacgacagaaaggtatgtccacatagccgacactttcaaaagcaatatcaaaagcccgttggacgatctgttgatggaggaagacgaggtctgatacttaaagaaaataacagccaaatcggctgatagtataacattaatcgctgagaaaaaatatgaataattggattgcaacagaaggaagcccatttgtcattgttgagcaacaatatgcccatcaatggaacggtcaagaagactacaatgctatatgtagcgtaacagattacttggggaaaatctatatagacaatcatgtcctattggtaatgggagatgaaccgatggctacacgcatagtaaataaagatggagcaatcttaataattcgttggaagtatgctcccgattatctaacggtggaaaaacttctggagaatgatatagtaactggagcagaaccgatagaagaagttgaagtaaaatgggattctactgaattagtcctatttgattctttgtctccctattgtgaagcatcggttaaagtgtttttatcactacaaaaaacatcttgtataataaaaacttatcattaccaaaaagacgaagtatctttaataatacattcaatccaataaagacgattaacatgcggctaaacctccccagaaaaaggtcggttagccaccaaccattatcaataattaaacagaaacgcaatgacaaaagaagaagcatatattttattaagtttccattcttgtagaaacaatgatatagaaaataagaaatgggaaaatggatttcttggttcacttcgtccatttcaaggaaaaatatatgagtgtaattttatcgagataatggaatgtcttaaagttcttgcagatgattttatgaagccaacgatcaatcaaaccctactaagtgatgtatatagcataatacatttaggcaggaggtggattgacggaactgattttgttacacaagagcagcaaaagcaaatcatagaatgggttgatatgatacaagattgtttctactacctattagaaggagatattgatactgcgtttcttgaatatgaagaatataaaattgataacaaggaaagctaactcctaaacggcgttcctttccaagccattactaacaaggaaaaaataatatgtgtcaatacaaatcaatatgcaatcctataatagagcttacaacacttttacagagttgtggcttcacaatagaaaaacaagaacttaaagattggcatttcaatgagtttgagattgtgatgaaaggaaagaaattacccttaattccgcaacactattacaaatataactttttaagtacctgagcaacaaaaagttgctcaggaatttgccatgtcagatttttcacctatcttagtgttgcaaatcaaaatatgtatcaaacccgacagacatggcaaaggtagcaattaaatccgagaaactcactccttttggaggaatattttcaataatggagcaatttgactccagactctcatctgtaatcgactcaaccctcggtatgagatgcaggctgtatggttatcaatacagcgaaatcatccgttcgcttatgagcgtttatttttgtggcggctcatgcatcgaggatgtcaccactcatctgatgtaccacctttcgcttcatccgacacttcgcacatgcagtgccgacacgattcttagagccataaaggaactgacccaggataacatttcctacacatccgacactggcaagacctacgacttcaacacggcagacaagctgaatacactgctcctcaattgcctattgtccacagggcagctgaaagagggcgaggggtatgacgttgacttcgaccaccagttcatagaggctgagaagtttgatgcgaagcctacatacaagaagttccttggttatcgccctggcgtggcggttattggcaacttgattgtcggcattgagaacagcgacggcaacacaaatgtccgtttccaccagaaggacacgctgaagaggttctttgaaaggtttgaacaaaacaagcttattatcaaccgtttcagagctgattgcggctcgtgttctgaagagatagtggaagagattgctaaacactgcaagaccttctatatccgtgctaaccgatgcagttcgctctacaatgacatctttgccctcagaggttggaagaaagtggaattgggcggcattgagtttgagctggcctccattctcatcgagaaatggaaagggaaggcataccgtcttgtgattcaaagacagaagcggatagacggcgaactcgacctgtgggaaggagaatacacctaccgctgcatccttacaaatgactacgagtcttccgagaaagagattgtcgaattctataacctccgtggagggaaggaacgcatcttcgatgatatgaataacggattcggctggaacaggcttccaaaatcctttatgggagaaaacacggtgtttcttctgcttatggcactcatacgcaacttctataaattcatcatggcgaggcttgacgtgaagaggttcggactcaaagcaacaagccgcatcaagacgtttgtctttaagttcatctctgtgccagccaaatgggtcaggacatcaaggaagtatgtgctgaatatctattcatgcaacaatgcttatgccaatgtgttccagaatgactttggataacaccgacaacttatagtcgtgattttgcgtattgcctcaagtcgcatggtggggtaaggggcatttatatgtctttatggtgacattcgatgcactgtgccccctttttactaacgatgcagattcttttcgcttctgtatcatattaggcgcgtagttgcggatttgaggattacaacttccaatgatagatatagaaggtatagaacaacatagcgacaatatatattgttgcaaatgtcattggtctgttgtaaaactaataatgaattgacacaataaaatgttagtaacaagcggcttaacctcccctgaaaggtcggttagccaccaaacattatcggctcaataaaatgttcaatttttaattagaagaaaaatgaatactaaaacaaatgatttaaaagaaattatcaaaagttggatcatcaatattgataaaacagaagaattgccttctgatattgtggctttgagctttaatctttatgaaccttatggtttagaaatggttggttctacttggtttgatgaaaaggatgaagattgggcatgtgatgaaacttttgaaccagctcaaagaagttgtcctaattttgaaatttcagacaaactaaaatgggaagaagtgttagaaatagttgtagctattcttaaagacttactcaatgaacttgctgacttaaatatttttagagtagaacatatcgcagttggatttgtagatggtgatttgattatcattaaataatcaatatgccgataacacgcaccgcaatcgcctaaacggtgattagctgccgaacattagcaactttacaaactaaaaagaatatgagtgaccaaataatttttgatgttgacggacttatagaagctcaaatccgtcagagagataaagactacgcgaaagtctgttgtcagaacttattaaactacgcatacggaaaggggcttttgtgtgataatccatgtgataatgaaggaaacctaatcatgccttcaattatcaaggaaagttctttaacagaaattggtaaacatatttttgttgaattgctatttaagtggtttgcatacacagataatgaaagtggaaaaattgacagaaaaaataacatcaaaatgttagagaagtattacaatcaacttttacaaaagattgatagaaaataggttgctaacaaacagatgaaacattgaaggcggtttatctgccggacattataataaataaaaatcaaagcattatggcaaaatatgagttgggggcaatttataaaattaatggtcgaagtggtgaattgtattatgtaagacttttgacaaacgactgttatggcgttttttcatcattagaaggcgaactgaatgaagagacatttgctcaaacccattatcgtctctattttagctgtaactcttttcctataaaacgaggtatatgggaaaaagtcgtatcatctccaaactgtacagatattgcacggtggcaacgccctcaatatttagctaattttgctaatttcaacatgaaattatttcttgatcaatgtagagtttttcatgaagatgggaacctttatcaatgtgaaagtaaagaggagtttattagattagtaaaatccggtaagattttattttgttttaatacttatgaaattataccagactttctaatgaggtattacaaggatttccccaatagctatattgtaaataaagattttatccatagtggaactttggaataccaaaaagaacaaacaaatgtattaaaagaattaggctttgatattggaaacttattataacaagcggctgaacattcctataaaggttagttagccaccaaacattagacacctctaaataaaattatatggttgataaaaaagaaatattgaatcaaatagtgaatgtgttggaaaaacctttcgttacacatggttttcgatatgtacgaggtggtcgctttgtacgaaagctatctgatggaaacacagaacagcaatatcatataactttcaggaagaaatacggctgttttcttatgtcaatcgagcttattgttcaaaataaagtgctattaaaagattttgatgttttatacagagaaaccttaatctttggataccggaattttgaagataattttcgggatgaatgtataaaaatggtattgaaacaaaagtatgtaactttatgcggacttggggattggagagaacttaaagaggaaaatgaatcgctggaaagtttcaatgccagatttcgcctctggtcacccccttattttgaagatttgaaggatttgaataacattttggaaaaagaaggaagtcccacatggcaagagcaatgtttgaccagcataaatctgtctttgaaatttttcaagaaaacagaagatataaactggattataaacaatacagaatatcaaggactgttcctattaaagcaaatggggcgagttgaagaagttgaaaataagtacaattcgttacttgaaaaaaagaggaaatatgggaataacacagaaagcatagagtatttctataaattattaatgaataaaggtgtctaacaagcggctcaaccgccccaaaggtcggttatctaccaaccattagttgcggtcaaaaacgaaataaaaatgaatgtaatatcagaaaaagaatattcgttttcaaatgcgcttttttggaacgtaatgttacatcatcatattcgagcctttgatgaagaaagggatgcgaattttgatgaagtatgggatgaagaacttgtaccaacattgttggatgaaaagaagtacaagaaatattggtgttggctatctcaaattgatttgaaaacatccgaaaatcaaggtgaaatagaaaacccaagaactctaacacttcctatcggcagcgatattgtattgacaatagaatttcatccttgctgtacatattattttttgaatgacactttaatcggggaagttagtggcaactttcacttgaagtatctcacatattcggaattaatgaggattacaaaagagatatatggagatgtactgtttcatttactcttacctttgtctgcaatcaaagaaaaggaaaaagatacagcactttttgagattgtccaacgattgcaacaaattcccttatttaaggaacattccgaatatataggtaaatgtatcttgaacggattattagtatccaactctgacatacaggaaaattccaagataggaacgatatgtacaagtaatcattcgtatagaaatgctttgatatataatgatgaaaagcaggaaataaaggagctaaatattcttttgtcaaagttataaatttgcaactaacacgtgaataaatctccccgaatggtcgattattcaccgaacattatctgcccagaataattaacaataaaaaagaaaaaaacaatgattaggtataccttaattccgcaacactattacaaatataactttttaagtacctgagcaacaaaaagttgctcaggaatttgccatgtcagatttttcacctatcttagtgttgcaaatcaaaatatgtatcaaacccgacagacatggcaaaggtagcaattaaatccgagaaactcactccttttggaggaatattttcaataatggagcaatttgactccagactctcatctgtaatcgactcaaccctcggtatgagatgcaggctgtatggttatcaatacagcgaaatcatccgttcgcttatgagcgtttatttttgtggcggctcatgcatcgaggatgtcaccactcatctgatgtaccacctttcgcttcatccgacacttcgcacatgcagtgccgacacgattcttagagccataaaggaactgacccaggataacatttcctacacatccgacactggcaagacctacgacttcaacacggcagacaagctgaatacactgctcctcaattgcctattgtccacagggcagctgaaagagggcgaggggtatgacgttgacttcgaccaccagttcatagaggctgagaagtttgatgcgaagcctacatacaagaagttccttggttatcgccctggcgtggcggttattggcaacttgattgtcggcattgagaacagcgacggcaacacaaatgtccgtttccaccagaaggacacgctgaagaggttctttgaaaggtttgaacaaaacaagcttattatcaaccgtttcagagctgattgcggctcgtgttctgaagagatagtggaagagattgctaaacactgcaagaccttctatatccgtgctaaccgatgcagttcgctctacaatgacatctttgccctcagaggttggaagaaagtggaattgggcggcattgagtttgagctggcctccattctcatcgagaaatggaaagggaaggcataccgtcttgtgattcaaagacagaagcggatagacggcgaactcgacctgtgggaaggagaatacacctaccgctgcatccttacaaatgactacgagtcttccgagaaagagattgtcgaattctataacctccgtggagggaaggaacgcatcttcgatgatatgaataacggattcggctggaacaggcttccaaaatcctttatgggagaaaacacggtgtttcttctgcttatggcactcatacgcaacttctataaattcatcatggcgaggcttgacgtgaagaggttcggactcaaagcaacaagccgcatcaagacgtttgtctttaagttcatctctgtgccagccaaatgggtcaggacatcaaggaagtatgtgctgaatatctattcatgcaacaatgcttatgccaatgtgttccagaatgactttggataacaccgacaacttatagtcgtgattttgcgtattgcctcaagtcgcatggtggggtaaggggcatttatatgtctttatggtgacattcgatgcactgtgccccctttttactaacgatgcagattcttttcgcttctgtatcatattaggcgcgtagttgcggatttgagggtatattgaaaaaggcgacatattccgtattgatggagtgagcagttatgcgcatggttgtaattgtgccggtgcaatgggtaaaggcattgccgtacagttcaaaagcaaatatccagatatgtatcttgaatataagcagttgtgcaaagaaaataagttttgccccggtgatgtttttgattatccttaattccgcaacactattacaaatataactttttaagtacctgagcaacaaaaagttgctcaggaatttgccatgtcagatttttcacctatcttagtgttgcaaatcaaaatatgtatcaaacccgacagacatggcaaaggtagcaattaaatccgagaaactcactccttttggaggaatattttcaataatggagcaatttgactccagactctcatctgtaatcgactcaaccctcggtatgagatgcaggctgtatggttatcaatacagcgaaatcatccgttcgcttatgagcgtttatttttgtggcggctcatgcatcgaggatgtcaccactcatctgatgtaccacctttcgcttcatccgacacttcgcacatgcagtgccgacacgattcttagagccataaaggaactgacccaggataacatttcctacacatccgacactggcaagacctacgacttcaacacggcagacaagctgaatacactgctcctcaattgcctattgtccacagggcagctgaaagagggcgaggggtatgacgttgacttcgaccaccagttcatagaggctgagaagtttgatgcgaagcctacatacaagaagttccttggttatcgccctggcgtggcggttattggcaacttgattgtcggcattgagaacagcgacggcaacacaaatgtccgtttccaccagaaggacacgctgaagaggttctttgaaaggtttgaacaaaacaagcttattatcaaccgtttcagagctgattgcggctcgtgttctgaagagatagtggaagagattgctaaacactgcaagaccttctatatccgtgctaaccgatgcagttcgctctacaatgacatctttgccctcagaggttggaagaaagtggaattgggcggcattgagtttgagctggcctccattctcatcgagaaatggaaagggaaggcataccgtcttgtgattcaaagacagaagcggatagacggcgaactcgacctgtgggaaggagaatacacctaccgctgcatccttacaaatgactacgagtcttccgagaaagagattgtcgaattctataacctccgtggagggaaggaacgcatcttcgatgatatgaataacggattcggctggaacaggcttccaaaatcctttatgggagaaaacacggtgtttcttctgcttatggcactcatacgcaacttctataaattcatcatggcgaggcttgacgtgaagaggttcggactcaaagcaacaagccgcatcaagacgtttgtctttaagttcatctctgtgccagccaaatgggtcaggacatcaaggaagtatgtgctgaatatctattcatgcaacaatgcttatgccaatgtgttccagaatgactttggataacaccgacaacttatagtcgtgattttgcgtattgcctcaagtcgcatggtggggtaaggggcatttatatgtctttatggtgacattcgatgcactgtgccccctttttactaacgatgcagattcttttcgcttctgtatcatattaggcgcgtagttgcggatttgaggattatgattatggcaatggacatatatataaccttggtactcaagcaacgtggcgaacacgagctaaaatagagtatatcgaaaaggcactgatacagatgcttgagttagccagtggtgataatgtaacggcaatagccttacctgcaatcggtgctggattaggaggattaaaatgggatgatgtaaaagcaattatagagacagtttcaaatgattatcctaatgttgatttgtatgtagttgaaacttatcaaagcgaataaaggcagataacaagcgtatcaatctccctaaaggacgattattcgccgaacattatcgtttaatatggtaagtagaaaagaaacagtaaaaagttgttgtgtgaatatacttgatgatgtaaaaagaatattagcgcaaccttttgaatgtaggaagacttctcttcctgatggtgcattacataatgtacaaaaagaattggaaaatatgattaatgcgattgataaagatatttactcgtttacaccaagttatggcaaatatctaatagattgttggcttggagatgaattagtagataaacttcttgatgtttcttgtcaatatgaaaaactaattaagttgaaataaacgatagcatacggattaatcttccaaaggtcgattatccaacaaacattatcggtctaaaaattaaaatatggatagtaaacttcaattattcgctaaagtgttattaaaagaacactatgatgaatttttagaaatgattcagttgttcaatatagataagagaacctttgtccttcaacataggaaaatgtttgaaaagggatggtacgatacaagctctgaagacaatgaatttagtgaagtagatattatgctttgttttgctatagtttctcacagaatggcagttattgattggagtggtgaagaatattcagggcaggttaagcgttccattacgatgatgttaaagaattatgggatagaacgtttcttatggaacactaaaaagtttgaggattctttggattgggacaaaattcgccgaggtgactatttgcctttgttgttccaagctatgaacaagcaacttaacagaggcggttattccattgtgttttgtgatacaaaatcggattgttttcgttatgcaatattaccaactgccgagtttgtgcaatttgagaatacggaattagatgattatctgacaatcattagtcctaagatttacaatatatatcttgcagacaagggaaatgaattgcctaaaattatgctgtacttaaaaaagaaattttctgttccactaagtgaaatcaaggaattttgttcaagagataaaattttacttggaatagggaactctataattgtggatgaatatcgaaaagaaattgaacaacttggaggcaagattgaaacagaagaaatagaccgataacaaacagcaaaccgattgaataagcggaacgctgccgaacattagcaaccccaaaaagatgaaaatgattggagaaactataagaactgaatttgaagcattgaaaaatgactttgaaaccataaggcaacaaatagaagacgatgttgtcaggactgagttgtataagggcgagttttatgaacttactccatattcctatcagcgtaatggttgcaaacaaggaaaacctgtaaagcgtcctgatacaataaaaagcaccaaaaatctttgtatctacggatttaataaccaaaatcaaatcgtagaagttaaggttggttgttctattgaaaatcagttttatcacactttcctgtattatacagacaatcttgtgaaaagtattctatacgataatggaaaacatttgatgaatgtatgccattacttttttgagggcggaaagctgaaacggtcacagttatgtggtaggtatggttgccgtgaagagaattatatctataaagaaaatgctttgacacatattgaagtcaaacaatatgatattgagggtaatagtggtaatgatttaattcatatattccaatatcaagacgatggggctttagaaagtattaccaaatcatttccaaatggatattctgaaataatctataaaacgaaaagaggttgctaacaagcggcttaactacccctgaaaggccggttagccaccaaacattaatattaaaaggaaacactatgatacctgataaattgaaagatgattttaattcattgagaaatatgtttgatgaattgaaaagagaaattgataagaatgttgtaagggaagagaattacaaaggtgagttctacgaaatatccccttattcttatcaaagaaacaggtttaagcaagggaaaatagttggaaatgtaacttctctcaaaacaactaataacctatttacttattatttcgatgtaaaaaatcaaattatagaaatccgagagggcttggaacttaaaaatcaattctattacacctttttcatttatgaaaaggaactcatgaaaactattgcatatgataatagcaaacgtattgtgaatgtccgatattatctatatggaagtaatggtaaaatagagaaaatgtattcaaagggttctcgtggaagtagagaagaaacatatttttatgaaaatgaccgcctacaaaaaatagttataagacaatttgatagaaatgatattgaacaggatacgttacaacattcatttgattataagtctaatggagaattaaaatctattattctttcgacagaattatattctgaaacaatctatcaggaaacataaatttaatattaacaagccgggataacggactaacgccgttccccgtcaaaccattatcaattacagtacgacaatatgaacttttacttaataggtagtttagaaggatttaacgatttacgttttccaaatgtggaagattggcaaaattgtatgggacatgctgaaggtttactaaagcagtggaatcctcctgagatggaatatatatggaaaaaaagtaatagacataaacattttgatttatcacaattttgtaatcctctattaactattagcgacaaagcattaagtattttagaaaatattcttatcaaaaatggagaaattcttgatataaagtcgccaaaaggtttttatttttttcattgtaccaatataatagatgctttgattgaaaaagaatcagatatagtgtggttagataaagaaagaggatgggtgagttgtataaataaatttgtgttggataaaaataaaatccaagagcaaactattttcagacttccgaatgtaaattgtcgctatactttttatggggaggaatttaagaaccttgtattgaaacatcatcttcaaggaatacattttgatagatacgaaactattattcctcaaatccgcaactacgcgcctaatatgatacagaagcgaaaagaatctgcatcgttagtaaaaagggggcacagtgcatcgaatgtcaccataaagacatataaatgccccttaccccaccatgcgacttgaggcaatacgcaaaatcacgactataagttgtcggtgttatccaaagtcattctggaacacattggcataagcattgttgcatgaatagatattcagcacatacttccttgatgtcctgacccatttggctggcacagagatgaacttaaagacaaacgtcttgatgcggcttgttgctttgagtccgaacctcttcacgtcaagcctcgccatgatgaatttatagaagttgcgtatgagtgccataagcagaagaaacaccgtgttttctcccataaaggattttggaagcctgttccagccgaatccgttattcatatcatcgaagatgcgttccttccctccacggaggttatagaattcgacaatctctttctcggaagactcgtagtcatttgtaaggatgcagcggtaggtgtattctccttcccacaggtcgagttcgccgtctatccgcttctgtctttgaatcacaagacggtatgccttccctttccatttctcgatgagaatggaggccagctcaaactcaatgccgcccaattccactttcttccaacctctgagggcaaagatgtcattgtagagcgaactgcatcggttagcacggatatagaaggtcttgcagtgtttagcaatctcttccactatctcttcagaacacgagccgcaatcagctctgaaacggttgataataagcttgttttgttcaaacctttcaaagaacctcttcagcgtgtccttctggtggaaacggacatttgtgttgccgtcgctgttctcaatgccgacaatcaagttgccaataaccgccacgccagggcgataaccaaggaacttcttgtatgtaggcttcgcatcaaacttctcagcctctatgaactggtggtcgaagtcaacgtcatacccctcgccctctttcagctgccctgtggacaataggcaattgaggagcagtgtattcagcttgtctgccgtgttgaagtcgtaggtcttgccagtgtcggatgtgtaggaaatgttatcctgggtcagttcctttatggctctaagaatcgtgtcggcactgcatgtgcgaagtgtcggatgaagcgaaaggtggtacatcagatgagtggtgacatcctcgatgcatgagccgccacaaaaataaacgctcataagcgaacggatgatttcgctgtattgataaccatacagcctgcatctcataccgagggttgagtcgattacagatgagagtctggagtcaaattgctccattattgaaaatattcctccaaaaggagtgagtttctcggatttaattgctacctttgccatgtctgtcgggtttgatacatattttgatttgcaacactaagataggtgaaaaatctgacatggcaaattcctgagcaactttttgttgctcaggtacttaaaaagttatatttgtaatagtgttgcggaattaaggttattataaaatgaatgattgttttaaagtttgtagttaaagtattgataacacgcacatcaatcacttaaacagtgattatctgcatcctattaaacattagaaaatgagaacaccaatcataatcctgttatttgtaatcctgcttgccgcaagctgcggagagcctcccatgccgccgtcggacgaggaaatgatacgccatttcaccacgcacgaggtggcgttccgtaaggtgtacgaaatcatggcagagagttcagaaggtagttttcactacccgccgctttctccggaagaggtcattatacttgattcaacagaacaaagcgatacattccatgaaacgaatgacgaacaagacattccggtatatggactgttgaagccggagcgaatcctactcgactccttgttatcagagattggatgcggttttatccttgttgatcgcagggaatggggaacggcagattcggtatatgtgagccttgttatgccgtactactcccacggcatcgtggatgcgggaacgtccaagagtttcgtttacgatcccggattgagaagccgtcggaatatccgtatcaccgaatatggcgacctgaacgagatctaccgcaggacgtacaacgacaccacgctttacaaacccatcaagggaaactggtacatcgagttagaccattcgatataacggcccggagttcgtatcaaagcttgtttcactttttgtcaagaagatacatcataaagcagataatggctatcgcaaggaaaaataacagaaccgcaaggagttcgttaaacctgcacttggcatagtgagacatcactgctttgcctcgccatttgtaaatcctgctgacgagcgacataacggcaaatgtgacaatgctaaaaacgacacatggcaacaatgccgacacacctggaaaaagccggatagtaacagtcatcatagggaatatcaaaagagcgaagatataaatcgagagcatcatttcgccatcgaccctgcctgttcgtcttgcttgttccaatttctcccccatccaccagaggtagtcccagagatagaaccgttgcttattctcctgccgtttcatcatgcccaatgtataaatccgaggtggaacatcagcgctacatttgccacgatcagggcgatagcgataagaactattttggcgagcttcctgccgggatgtttcatcttcccgtaatgttcacggagcgcttcacgccgtccggctgtatagcgtagcttgcagaataaatcgggaagaaagcagagaggaatcactatggccaaaccaatcatccagccgaaaaggcgcaatatcggcggaaacccaagcggtatgagtaggacgaagagccagcaccaaaacagtagcatacgtccgttgagattggtacgctccctttcgtgccatatctcggctacataccacatatagtcgatgaagcagatccggtatttgcgattgtccttttccataccgttatctccatacaaagaaaccaaccaatataagtataatcagaacgctgaccaacacaatctgaaccctgcggcgtgtttcaggcttgcaatcgtcaaataaccacagtttgctgttaaactgccaatgacacgcccatttccaacggaacagcaaccctgcaagccatagggcaagcaacccgacaccaaacagcaacccgtatttcgggtgagcctgcaaccactcgaaaaacgcttccgccttgctgttcattgcttcgtatatatcggtaactgtcatacttataattaaaaggattccgaacacaaaaataatgttttctgttcacataatcactactttatgctccaaaacaccggctgtgcggttataaaaccaagaaacagcccccgttaaggtaacggagggtgtttgcgggggtgtttgtgttcatttagttctgttccggcaggagcttgcaaagcaccgggtcgttcttgatacgttccagttcctcggcgacgatgcggccggcctctgccttgatacgttcgtagttttcctgcacgacctgtttcatgtgatccgtcccgttctcgtccgtgaaatcggtaatttgtggtatcttcttgtaccgggccgtttccgctttcactttttcgttgtccacgacaatctcgcagtggaaaatcttctgctcgatacgttcgtcgaaattgtccgccacagccccgacgaacattccctgcgtgagcgtcgagatcttcgaggccgggatcaggctgtccagctgcgtggatatggatgtcgatttgtcgctgcggctcaacgtcatgctctgccgcttctgcaataccttaccgaaccgttccgagagtgtcttggccgtttcacctacgacctgcccggagaagatgttgcccaccgtgttcatcacgacggcggcctccttgtccccgtagtccctcttcaactgtgaaaaatcctggaagcacagcagcacggcgaccttgttgcttctggccgtggcgatcaggttgtcgagtcccttgaagtagattgtcggcagctcgtcgatgatgatgcccgatttgagctggcctttcttatttatgagcttgacaatccgggaattatacaatcccaaagccgctccgtaaatgttttgcctgtcgggattgttccccacgcagagtatcttgggatcgttcgggttattgatgtcgagcgtgaagtcatcgcccgacatgacccaatatagctggggcgaaatcatgcgggaaagcggaattttggccgatgctatctggccctggagctggtcttgagcgcctccgagccaggcatccataaaggggctgaggtagttttcgagttccgggtaggatgtcagaatcgggaaaatatcctcgtaccgcttgttcaggaactcgatggcgtgcgggaaggtacaataccgcccgttgtcgtagatgcgcaggaaccagatcacggccgcgaaaaggataatggggctttccacaaaaaaatcgccctgcttctgcacatcgggtaagtcaagggcattactgcccccttctcccctaagaaccgtacgtgagagtttcccctcatacggctcaagcaactcaatatttctatttgttgttagaaatcggctcatactttcaacagtttcgtttatttcgcttgtagcagttgttatggacaagttgccgtacaattgaaccaccaacagatatttcattgacgttccatgcttttgtacaatctatctccttgccgcataacggacaagtccgcttctgcttgttccataaatataagagtgacttacgtcctttgagagattccagcatttgttgctcctttcgctgaaagaaataatcatcatattccgggtcgaaagggtttgcctcccccttgacttgcttgtacggagtataatgtatatccgacaaccttttaagggtcaggtagttcactttcttgctttttgtttcatatttccatgcaaacgtccatttacgcccccgaatttcatgccaatacttatctgcaacccaagacttgcgtttctttgggtggcgacgtaaagcccatttctttgtgaggttgtaaatgtgattgtcgcaaccgtgaaaagcattggttgatgcaccatatcggtaatagtttccccaacctgttatcacaggattgagcattcgtatcagcgattcctgcttacacattttatgacctttaacgatgtcactgatttttgccctaaagcgtttctgtgcatctttggacggggatgtgtacagccttttgccgaacttccttacattgaaacctaagaaatcaaatccatcgtatatgttcgtaatggtagttttctcttcggataaggtaagacccctttctttgagaaattctatcaccattggtttgacctcgttttccaataattccttatctcgacctgtgattataaagtcatccgcatatctgataagattcactttgtagtggaatgtcttatagttgatgaaacgtcttttgaatctttcagccaagagtggttgaagtccgtcaagtgccatatttgcaagtgtcggtgatatgatacctccttgtggtgtaccctcttctgtcgggaacagtttaccattgaatacagctccacatttcagccattttctgagtattgttttatccatagggatattttcaataagccagtcgtgactgatgtggtcgaagcaacccttaatatctccctccaaaatccattcgggggaatgctggcgatttagaaccgtatcaatctgacgaattgcgtccattgtcctgcgcttctttcggaagccgtaagaaaaacggtcgcctgtcgtttcggctatcggttccaatgccatgagatataatgcttgcatcgccctgtctttcatggtcggtattcccaacggtcggagtttaccgttctttttcttgatgtgaaccctacggagcggctgtggatggtagccacgacgtctaagttcaccgattgctttgtacttgcgcttgggagagtcccaaagctgtttatctactccagacgtattcttccctttgttggaagtaaccctctttactgccaatgccttggcgtaaaaagagtgagtaagcatccactgcaaggttttcaccttgttatgtctgccttctttctgagcctttacaatacgcgcttgtagctttcggacataggtttcacacttggaccagttcataccgtcccaagtcagattcctgctgtcagcaggcgcacacgatgttttaatctcgttcatttgctttcctccttttgaaagttctaaaagttatcttgtaaagagttaccatatacggaagtctgcccactttcgtgtcggatgatgttaccctcattaactcgtgatgttggttcaatccgtatcctccccattacagggcggcattcgctttctccgttatctcatacctgcaccccattcggcttgccttgcggttcgcttactcgcattattacgagagagatacaggcttgccctgttccacgcaattgacaaacggatagtttaggttctgccaagtccgccggcagtgctgtgtccgtgtaaccccaacatgggcgagggttatccgactgcttaccttttggtgagagctaaagtatcttgcgctccttcaaaccttacgacggctaaagtcagttcacttacgttaaccatgctatccagcctcgccactcgacggtatgatactaaccgcccttaacgttccctcacggttcagtcttgtcctttcggaaagtgtactttgtcctataagcttggcacaacccatcactggagatgcaccttatagtaggctaccgctgacggaacagcgggttaaatcttgcaatatacattgctgtttaacaatcaattacgtgacttttcaggtcacacccagcttcggttcaggttgagcatgatggtataggcgctctcgtaggcgtccgaaatatcggtcatgaagtccgggtgaatggggttacagcggtgcgagcggcgcgggtcgtcgaaatttatgacgtagaaagtcgggattttcttgtaacctttctggtgattcagcaggtggttgtaagcgatttccgaaagatcgggaaacttgtagtcatagatgtattgggtatagcccttttcgatttgctgtttaataaactggtttacaacacaataactcttcccgctgcccgggcttcccatgcagatgcaagccctttgcgggtttacaacgttggcgaacccgttgttccactgtttgttatagtaaaatttcgtcggcagatttatggagtactcgttctcgatcaggcgtgtttcctgctggaatgattcgttctcgttgttgaaagggtcatccatgagattgttcttcagcaggcgggacatccacacgccgcccatcaagaggcagatatacccggccgatagggtcagtatgtagaaagccgcgttcgccgctgccgtcagcggcaagtccagcagccaccagttgaagaagaacagcacgcctcccgtggccagcgatgccgtgattttccgccaggtaattttctcctcttttactccttttgtcccgaggcatgaaagggcgaggaacactacggcgaaaagtttcgtccatagtatattccggaacagccccgcggtgcggtcgaagttcagcagaatcctatcgaccacgccgatattgattccccattcccgtatctgcccgtagcagaaccagtagatgttgataaccacgaacaagatactcaatgcccgcatgaaatccattgttttagcaagaccccgaaggtcgtcttcctgttgcataaccgtaagatttaataaatgaatgataattgagatgttatactttcctccgtcgtgaggtattccgcttccgttgcccgtcccgtccggcaggcgcttgtttcggggacaagcccctcgtgttttccccgggattccgttttccgccgaagcgcagctcgaaggcgttggccgagtatgcctttcccagccgtgatccgttcacgaccgtccgtgtttcgtggtcaatgaacgtcacacccacgatgcggccgttttcgttgcgtcgtatgtagagatccacccgggctccccgcaggcgttcgcgcagttcttcctccgtgggttctccccgaagcgctttatcgacccggccacggatttgcctcctcgtgtcgtccttcccgaaccgttcggcgctacgctccatgtgccgttccagcccgtcatacccgacctctttaccgaacagtgaggatttgagcggcgcggccactgccttgtccccgttctcgtccagcagcgtgtagagcaatccccggtagggggttccgttccgctctccccggacttcctctatacctatattatataaggacagcaatgcccggaactcgccgagggtctggaagcggtatgtcgccacggccggttttattaccgctgccacctggcgtttcaggtcgccccgcgtgtaatcggcggggacgatcccttgccctttctcccgccttctccctttggcgggatgcagtccgtactcccgttccagttcctcggtaacggccacgctgcgttcgttgcgcctgctgtcgtttatcttgcgcccgtcctgggccacctgcaccgacacgatatggatatgctcccgtccgatgtcggtatgcttgaatacgatataaggttgtcctccccagcccatgcgctccatgtaggccccggctatctccgcgagttgcccgtcgtcgaggcggtcttcgggagccgggttgagcgacacgtgcacgacgggtttttccgtccggtagtgcgagggcatccagcgcaggaggtcttctgccgtcgcggccacgttgaagcgcccatccgccggctccctcacgatgtgggtcagcagcaccttcccgtcgccccgatcgactttctcctggttgtacgccagcgcgccgtacacgtcttttccggtggtgatattggctaccatcgctgtttgaactcttcggagagcgacacgacctgctgcccgacggccgccagttcacgtgtcgctctctccagtttatagagcagcgcgagtgttttcttctcggaaaaatgcgcgtgcagctccttcaccacctggttgtaattcgttcccacggcacggaattgggcgtggaaagcggtcagcttcgccacgtattcgagcgttccccggtcggtctttaccacccggaacgcctcgttgaacactctcgctttgataaaagcggctttggacaatagcccggactgctcgtaaaggtcgaggaaacgggcatgttccacggctgaaaagtttaccgaaaagcggtaaacggccgggtcgtttttcgcgggtcgtccccctttgccccctcggggctttctgttcttttccatcgcatcgaaattttaaggagaggccagagccccaccggttcctgaaaattccgatcccttcgcggcctgccgcccttctgaaaagcaccgactccggaggtgctttctcccccttgcgggcaagctgttttctgctgcaaaacgagaatcgtgcagcagaaaacacagcttgctatttgccctttgcaaataccttctgcccgctcgcggacagaacattgaaagagccgccgtaaaacggggcaaggacggcttcattagcgtcgggatcgttcacgaggcaaagataccgacctattcaatcacttgtgccataagcgattacgccacttgcgtccactttgacgccacacgcggccatagcggaaaaagagcatacaacccgtgtttttaagggtttactttgcacgtgagaacggatacgggcaatgacacatccccctgtccgcacacgtgtggacggatgcagaaaacatcgtgtgcagaggaaaaagcgggtctttgtccggataagcaaatgcggttgcgcatgagtataaaatcggacacgcgcccatgcaccggcataccggcgtaacagcctgccagcgcaccagcatatatgcgtgccggcataccagcataaaatctcatgccgtcacttgtccggatacgtgaagagatgaacgattacccgattgtataactaaaaacgcatggaacaatgaaagagaaaacgaaattcgtggccttctccacccagaaaggcggagcgggcaaaaccaccctcacggtgctggcagcctcttacctgcactatgtaaagggtttcaatgtcgcggtcatcgactgcgattatccccaacactccatcgtggagatgcgggaacgtgacctgaagcttgccctcgaagacgaacattacaagaggttagcttacgaacaattcacccggcttcaaaagaaagcctatcctgtcgtggaaagcaacacgaaagaggcgttggccgatgccgactacctcctgccgcaaggtgatttcgattatgtgttcttcgaccttcccggtacgatcaataacgaggatctgattcattccctggccggaatggattatctcgtcgccccgatcagtgccgaccgggttgtcatggaaagcaccctgaattacgcggttgtggtaaaggagcatatcatgggccgcgagaagtcccggatgaaagggctgtatatgctatggaacatggtggacggacgtgaaaagacagagttatatcaggtttacgaggcggtaatgaaagagctgggtcttcctgttctgaagaccttcctgcctgacaccaagcgttttcgtcgtgagcagaacgccagccgtcgctctgtcttccgctccacgctcttcccggcagaccgttctttgatccggggcagcaacctggataaactcgtggatgaattgatcgaactgttaaagtaggatcttatgagcggaaaagaacatgacgacggtttggacgcttccttcatcatcagccaggccaaaagccgaaaccggccattacatccttacacgccggaaaaagaggaggaggcatcggctctatcggaaccgtccggcgaggccgccgcctcgccggctacgaaagaggagggacgccgccgaagagggaaaggccaggattacgagcgtctttttatccggaacgccccctccaatacccgaagcggcaaaacggtgtatatccgcaaggagtttcacgagcgtataacccggatagtgcaggttatcggtaagaacgaactctcgctgtatagctacctggacaatgtgctggagcagcatttcgcgacctatcaggaggaaatttcggaactctacaagaaacggaactccgatattttttagttatgaacccaatatttacaacctattaaaaacaatccatcatgtcagacaaagcaattattttatctgttatcctggcggccgtcctttgcgtcgccgtgcccttcatcttccgcgtgtgccgctaccggcgcaggatgaaaacccttatcgtccccgacggcccttcgggggaggtcgccgtggggactgtccccacccccgaggccgagtacctggcccgttacatctgcctgctgcggctgcctttcgccggtaacaagcacgtgaagatacgtccgtcgtaccacgagcgtatccgcgagatcacccgtgtcatcggtcgtggcgacgtgacgatcacggcctacgtggacaaggttctcaaggcgcacctggacgataaccgggaaaccatcgagcggcttttcgaggagcgtgaggccgtggcctccctgcaacccaaagcggaggagcgatgaacggggcgttgtggctgctgcccctctttgccgtggggtatgccttgtgggcgtttttccgcctgcggcggatggaacgtaacgaaccggcagacgggatcgttgccgaagacacgccctgccggcaggagatcatcggcaggagccgctttgtcctcgacccgcgccactcccggccacaagctgccgtagaatctgaaactgaaaaagttacggaaaaagccgatatatttgtgcccacgaatgtacccgaacacccccggcagattccgccggaagacctggatgaagtgttcggtgtcgctcccgagggggagcctaacgaacctctggaaatcgactttccgctgtacgatgaatctttcccggatgcggacgcggaggagccggattatgacgaggatgaagacgacaccgaagagctgccccttttgggccgctcgcttgcccagggggttagttttgaacagatgggcgaagcctaccgccacgtggtacatgatccaccttcaacagacgagcaaagggaggaaacgggacgtgtcctcctgggcctgaaacagaccgacatgttcgaggtcatcgtttcgggccgccccgacgggaacgacagggtaaaatccctgatcgacacctacctctcggcctttcaccggcgtatgtccgagaggtctgcggaaagcccatctccgcagggttcggttcccacgggtttcgacgtccgtgagtttgtttaaccccataatgacatcacgatgaaagaaaaagactacgggtagcacgtgaggctatcctcgaaccactgaaaaaatccgaatcaagaagtttaacccggtgcggggcctatccatccccgcgccacaattcaaacattatcgagttatgagaaagaacaagattcttcttccggcggcatttctctttgccgccatctcctccgctttcgcgcagggcaacggcatcgccggcattacggaggctaccaacatggtaaccagctacttcgatcccggaacgaagctcatctacgcgattggggctgtggtcggccttatcggcgggatcaaggtctataacaagttttcgagcggcgaccccgacacgtcgaagaccgccgcgagctggttcggcgcgtgtattttcctgattgtcgccgcgacgatcctacgctctttcttcttgtagtccaacctgtcatgcaaataattatggaatatggaatcaacaagggaatcggcaagagcgtggagttccggggcctgaaggcgcagtacctcttcatcttcgcgggcggcctgctggccgtcttcgtggtgttcgtcatcctctacatggcaggggtcgatcagtgggtatgtatcgctttcggcgttgcggcggcttcggtgctggtctggcttaccttccgcctgaacgcccgttacggggaacacgggctgatgaagctgttcgccgcgcgccggcatccccgctacctgctcaaccgcaagtccctgcgccggttgctgaaaagaaaggggggccgcgtatgagaaacatcttgaaagccaccacgctggaaagcaagttcccgctcctggccgtggaaggcggttgtatcatcagcaaggacgcggacataacggtcgcctatcgggtcgaactcccggagctgttcaccgtcacgtccgccgagtacgaggcgatccacgccgcctggtgcaaggccctgaaggtcttgcccgaatacagcgtggtacacaagcaggactggttcatccgcgagcgttaccgcccggccacgggcgagggggacatgagtttcctctcccgcagttacgagcggcatttcaacgagcgtccgttcctgacccacgcctgcttcctctacctgacgaaaacgacgagggagcgtatgcacatgcgttcagacttctcgaccctctgccggggcaacatcattcccaaagaggtaaaccgggaatcggcgacaaaattcctggaggcggcggaacagttcgagcgtattctgaacgattcgggtttcctgacccttgtccgcctcacgggggacgagatcacgggtacggcggattgtccgggcctgctggaacggtacttttccctctcgctctcggagacgacttctcttcaggacatcgagctgggggccgaggttctgcgcgtgggcaacaaacgggtgtgcctgcacacgctctcggacacggaagacctgccggggcgcgtgggtacggatacccgttacgagcgtctttccaccgaccgttcggactgcctgctgtcgttcgcggcccccgtggggcttctgctttcctgcgaccacctttacaaccagtacgtgttcctggaagacagcgacgaaaacctgcgtatgttcgagaaacgtgcgcgtaacatgcagtccctttcccgctactcccgcggaaaccagataaacaaggagtgggtgcgatacgtcgctgtgtaagtaattgttaaacttagatttaacccgttgtttcgtcaacggtagcctatggacagatgcaccaatagtaatatactgtatcaaagctgtccagacaaggtagcccttccgaaaggagcagtcagaaccgtgagggaaagacaatggctgttagtatcatacagtcagggagcttggcttgggtggtatggttagcgtaagcgaactgtcgtctaaacgtcgtaaggttgaagaagccaaagatactgataggcttcagcccaaaagggaagcagtcggttattcctctccattctgggaatacacgaacagagtactgccggtgtaatagacagaacctaacccacttataagttacttgcacggaacgtagtaagcccgtatttctcctgccaatgacaggtaagcagaccgtaaggaatgccgaatggagtgcgggtataggattgcagaaaaagcgaatgccaccctgtaatggggtgaatagggattgaaacatcatcccgctgcgaaagcaggctgacttctgcggtaggtgattctttacaagaaacttttagaacttttaaaaggagaaaagcaaatgaacgaaattaaaaaatcgtgtgcatcgactgaccaaacgcagagcaaatgggacagtataaattggctcaaatgcgaagctgcggttcaaaagctacaagcgcgtattgtaaaggctcaaaaagagggtcgccacaacaaggtcaaagccttgcagtggacactgacccactcgttttacgctaaagcattagcggtaagacgtgtaacttccaataatgggagtaaaacggctggcgtcgatatggtaacatggaaaacgccagatgctaaagtgtgtgcaataaccgaactgaaaaggagaggttatacaccccaacctctgagacgagtacatatcagaaagagtaacgggaaattaagaccattgggtataccaactatgaaagaccgggctatgcaggcattgtatctgatggcactggctcccgtagctgaaacaacggctgatgccaattcttatggtttcagaaaagaaaggagcacggcagatgccgttcaacaatgcttcaatgacctggcaaggacgacatccccacaatggatcttagaaggtgatatcaaaggttgtttcgaccatatcagtcatgaatggttgcttgacaatatccctatggataaagttttgctccgtaaatggttgaaaagtggatttattttcaacaagcaactttttccgacagaggagggaactcctcaaggcggcatcatctccccaactcttgcaaatatgactttggacggactggaaaaactgcttgccgatagctttccgataaaccgctcgaagaaaaattactatactcctatgataaatcttgttcgctacgcggatgattttattatcacaggagagagtaaggagttgttggagaaccatgttaaaccattagtcattgagtttcttcaagcaagagggcttaccttatcagaagaaaagactaagataactcatatagaagaagggtttgattttcttgggttcaatatcagaaaatataaaggcaagtttatcacaaaaccatccaagaagagtcgaaagagatttttagataaggttcgtgaaatagtggacaagaacaagtcttctaagcaacaatctttgatacgattgctaaacccagtcattagaggatgggcgaactactacaaggggtgttctgcatcggaaactttccgtaaaacagatgcacaaattttcaacaaactatggcgatggtctcgcagaagacatcccaaaaaaggtaaacgatggattgccaacaagtattatcacactgtaagaggtagaagctggacttttgccgtaccgcttgaaaacaggaaagtggataaataccacactcttgtgagattgtcggatacgaaaataaagcgacatatcaaaatccgcagtgaggccaacccatatgatgccgattggaaagatttcttcgatcaatacaagacccgaagaatgcttgcacacttagacggcaagcaatatatctatcgcctgtggaatcagcaaatgcaatgttgccctgtgtgtggcaagcacatcacacgggaaactccctggaaaattactgaaatgacagggagcagtagaaaggcgaaagtcctaatacatgatcattgcagccgaattactaacagaaataaatggaagttactatgagccggcttttagttacaaataaaagttttgaattgcttgagccgtatgaggggaaactctcacgtacggttcttagaggggaaagctcccgtaagggggctgacctactcgacatcgaccagtatctcaacgaggcgcactcgttcggtcttcaatccgtccgggcccatttcaacgtgctggcctggtcggacgacgtgcaggagctccggcatatccgcaatgatgtgggcagccagctcgctctgatggagtgccgcccgcgccacaacaccgtggacgccgccacgctctactgggcgggtatgccgggcaacgcgggggatttccccgccgaggaatcgttctacacgttcatcgagcccgcagtctgtttcttcacggaggaaaccaactataaatcctcgtccagccctttcggcatcaagctgtgcgaccgcgtaagcggcaggcccctgcacctggacatctcggacgaaccgatgaaaaaagggatcattacgaataggaataaattcgtgttaggcggctctgggtcaggcaagtcgttctttatgaatcatttagtccgccaatactgggagcagggcacgcatgtcgtgctggtggataccggtaacagctaccagggtctttgcgagctgatccggcgtaagaccaaaggtgaggacggcgtgtattttacctataccgaggaacatcccatcagtttcaacccgttctacaccgacgactactatttcgacgtggagaagaaggacagcatcaagacgctgctgctgacactctggaaaaccgaggacgacaagatcacgaagaccgagagcggcgagctgggcagtgccgtgaacgcctatatcgagcgtatccgcgccgaccggaatatcgtgccgtgttttgacagtttctacgagtacctgcgggacgactaccgccgcgagctggaggagcgggagatccgggtcagccgcgaggatttcaacatcgacaacatgctcatcaccctgcggcaatattacaagggcggacgctacgacttccttttgaactcccgggccaacatcgacctgctctcgaagcgcttcgtggtcttcgaggtggattccatcaaggaaaacaaggagctttttcccgtggtcaccattatcatcatggaggctttcataaacaagatgagacggctcaagggggtacgcaaacagctcatcgtcgaggaggcctggaaggcgctctctacggccaatatggctgaatatctgcgttatatgtataaaaccgtccgcaaatactacggtgaggccatcgttgtgacgcaggaggtcgaggacatcatttccagcccggtggtcaaggaggcgatcatcaacaactcggactgcaagatcctgctcgaccagcgcaagttcatgaaccgtttcgacgcgattcagtccttgttggggctgaccgacaaggagaaggcgcagattctctcgatcaaccagtccaacaacccttcccgtaaatacaaggaggtctggatcggtctgggcggcgttcagtcggcggtctatgccacggaggtcagcgtcccggagtacctggcctacacgaccgaggaaacggagaaagtggaggtacagcggcttgccggcgagctgggcggtgatatagaactggcgatcaggcagctcgccgagggcaaacgttaaagggagggcaggccatgtatcgcaagtgtatcggatcagaccccacggcggcgcgtttggacttcgcgctgtacgaggtggcgggcgagtgggaaagccgctcgggttctccccgggttcgcatctaccgcaacccgggacgccggggcggcggtttttacgtggaggtgtcctacaaggacgggacacgcttctcccgtcccgtgaggaagtattggggaggtatccgttacttcgacctctacgggtatgtcgccctggcctacgatgtggggcgcgaggtgctccagctctccgcctacggggattattaccgggcgtcggaatgaccgcccaagtattcacgaattaaataatgaaaaggatgaaacgattgattttaacgctgttcgtggggcttctttgcttcacgtaccaggcaaaagcgcagtggacggtcatcgacccgtcgaacctcgttcagaacatcaagagcgcggttcaaagctcgaccacggcgaccaacatggtcaagtcgctgcaagagagtatcaagatttataaccagagcaaggcttactacgacgccctcaaatcggtgcataacatcatcaaggatgcccggaaggtgaagctgacgctcgaaatggtcagcgagatcacggaaatctacacctcgggattcaaccgtatggtttcagacccgaacttcacggtggacgagctggcggcgatctcggcgggttacgcccggctgctggaggagggcggtgcgctggtggcggaactcaagacggtcataaccggcggcaacggcctctcgctctcggacaaggagcggatggacgtggtggatcaggtttacacgaagatgctggagtaccgcaacctcacgcgctattacacgcgcaagaccatctccgtgtccttcatccgcagccgcgaaaagggcgacgcgcaccgggtgctggcactttacgggaacccgaacgacagatattggtaacctgaaaacggaggcagtcatggatttcgacaatttacaccaggttctccggaacctgtatcaggagatgatgccgctatgcggcgacatgatcggggtggcgaaaggtatcgccggcctgggtgcgctcttttacgtggcttaccgggtatggaaggcactggccagcgcggagcctatcgacgtgttcccgctcctgcggcctttcgccatcggcttgtgcgtgatgttctttcccaccgtggttctggggacgatcaacgctgtgatgtcgcccgtggtgcagggcacgcacgccatactggaggggcagacattggatttgcaggcataccagcaacagaaggacgatttggaagccgaggcccgcaggcgcgagggcaaggcttggttagtggacgacgaggtgtatgaacaacggcttgcggatatgggtatcacggatttgggcgagattatcagcatgtgggccgaacgcacgtggtacgacatcaaggccggtttccggcagcttgtccgggacttcttcgagttgttgttcaacgccgcggggcttactatcgacacgctgcggacattctttttagtcgtgctgtcgattctggggcccttgtcgttcgccctctccatttacgacggctttcactcgacgctcgcgagctggatttcccgctatatcagcgtgtacctttggcttcccatcgccgacctgttctccgcggtgctggccaagatccagacgttgatgctccaggcggacgtcctggccctgcaagaccccaactacattcccgacagcggcagcggtgtctatattatctttttgattataggtatcataggctatttcacgatccccaccgttgccgagtgggtgatccagtcgggcggagccggcggggctatgggcggtatcaacaaggccggggcattcgccacgggtgtcgcgggcggtatcgccggcaacatgatcggccgcacgttcgggcgtcgcggcggtggcggttcctcctccggtaacggcggcgttggcggcccggcttcgggcagtgcccccaacgggcgcaacctggcaacacaaggtaacaataatcattcataacaatttggacaatggaattcaagtcattaaaaaacatcgaaacaagtttcaggcagattcggcttttcggtatcgtgttcctctgcctgtgcgcgctggtatccgtgttcagcgtggtcgcgagcttccgtttcgccgaaaagcagcgcgagaagatctacgtcctggacgggggcaagtcgctgatgctggcgctatcgcaggatttgagccagaaccgccccgtggaggcgcgcgaacatatccggcgttttcacgagttgttctttaccctctcgcccgaccgtgcggccatcgagagcaacatcaaccgcgcgctgttcctggtcgataagagcgccttcgcctattaccaggacatgcaggagaaaggttactacaaccgtgtggtgtcggggaacatcagccagcgtatcgaggtggactccgtggtgtgcgacttcaacgcctatccctaccgggccatgacctatgcccggcaaatgattgtccgcgagagcaacatcaccgagcgttcgctggtcacgcgctgcgagctgatcaactcggggcgttcggacaataacccgcagggtttcatcatggagaaattcgagattctggagaaccgcgatttacgtacattaaaaagataaggctatggcaaagaagagaataaaggctttcggggagtgggtcgaagaccacctgcgccgcgcttgcggggcactctcgcccgataagcggattatcgtgatcctcacgctgctcttgttcttttccgtcttgtcgctctactttaccgtgtcttccatctaccgcttcggcaagggagccggggaacggatgcagatacggcatatcgagcggctggaactggaattaagacaacggcaggaggccgacagtgtaaaacatctaaaagatttcaattatgacgacgaacgaaaaacagaataaacagccggaggcggggaaaaaggaactcacgccccggcagatacagatgcggaagaagatggtggtcttcccgctctttttcctggcctttgccgggtgcatgtggctgatcttctcccccggcgaaaaagaacgggaggagccttcggagggtttcaacacggagctgccgaccccggaatcggagggtatcctctcggacaagcgtgatgcctacgtgcaggaggagatgcggcgcagggagcgggaaaagatgcgctccttgcaggatttcgcgttcgggatggaggacgaggaggaagagcccgtcatgcccgctgccgtgccggataagtcttccggccctgccggcggttcgtcgggagctttccggacttcccgtgccgcctatgccgacatcaaccgccagttaggcagtttctacgaggacaccgccggtgaaacgggggaagagcgcgagatgcaggcccgcatcgaggaactggaacgccgcctggaagaacagcaggcgcagaaaacggcccaggaggagcaggtggcgctgctggagaagtcctacgagatcgccgcccgctacatgaatggcggtcaagcccctgaagccccgcgtcagaaagcctccgtttccggcaaggcttccgtgcagcccgtgcgccaggtgcgccgtaacatcgtgtcgctgctcgccgccccgctgcccgattcggtcttcgcccgtgagttcgtcaagccccggaactggggtttcaacacggtggggagcgaccttcgcgagcccgagcgcaacagtatccgcgccgccgtgcagcaaaccgtgacgctcaccgatggcggggaggttactttccggctgctggaaccgatgatggcgggagatctgctcatcccctcgggtacgcccgtaacgggggcggcgaggatcaacggtgaacggctgacggtcaaggtcagcgctgtccagcacggcggggcggtcgttccggtcgatctgtcggtctatgacacgaacggcaacgagggtattcccgtgccggggtcggaagaactcaatgccgtgaaggagatcgccgccaatatgggcgcgggcatgggcagcagtatcacgatcacggacgatgccggttcgcaactgctctccgacctggggcgcagcgccatccagggcgtgtcgcaatacgtgagcaagaagatgcgctcggtcaaggtcacgctcaaggccggttacagcgtcctgctgctcccgccccttcaataagggtacaaacgacgtacttccgtacaccactgaaaaaatccatttttatcaacaatcaaaaaattatcgagtatgaaaaagattcttctggcactcgcttttatcgggtgcatgttcgctgcccacgcgcaggaaaagccctccacgggcgatttgtacgacggtcttacccgtccgctgactttcaaccgggttatcccgccctacgcgctggaggtgacgttcagcaagaccgtgcatgtgattttcccctcggccatccgttacgtcgatctggggtcttcggatcttctggcggcgaaagccgacggcacggaaaacgtgctgcgtgtaaaggcggccctgcgtgatttctcgcgcgagagcaacctttcggtcattaccgaggacggggcctattacagcttcaatgtcaagtatgccgacgagccggtgaaactgtcggtcgagatggcggacttcctgcatgacggggaggcggtaaaccgccccaataacgcgctggacatctatttgcaggagttgggatgcgaatctccgctgctggtcaaactgatcatgcagtccatttacaagaatgaccgccgcgagatcaagcatatcggttgcaagcgtttcggggtacaatacctcctcaaaggtatctacgtgcataacgacctgctttatttccacctccaactgaaaaactcctccaacgtgcctttcaacgtggactacctgacgttcaagattacggacaagaaggtggccaaacgcacggccatccaggagcaggtcgtatggcccgtgcgtgcgtacaacaacgtgcaggtcatcggcggcaagcgtaccgagcgcatggtcttcacgctcccgaagttcacgctggccgacgacaagcagctggtcgtggaactgcacgagcagcagggcgggcgacaccagactttcacggtggagaatgccgacctggtgcgcgcacgtgttatcaacgagttaaaggtaaagtgatatgaaacgggcgatattcattctcacgctggggttatgcctcctcctttcggacggggcgcacgcccagcgtgccctgcccgccatgcgcgggctggaaatacggggaggcatggccgacggcttctatacccgggacagccgcagcgaaacgggctactggttcgggctggccatgagccgctacgcgaagaatgccgacaagtgggtgttcggcgcggagttcctgaaccgttattacccctacaagtcggaacgtatcccggtggcgcagttcacggccgagggaggttactattacaagttcctcgccgacccgtccaggacttttttcttctacctcggcggctcggcgctggccggttacgagagcgtgaaccggggcgagaggcggctctatgacggctctacgctccgccaccgcgaccgtttcctctatggcggggccgtcacgctggaggtcgatgcgtacctgaccgacaggattatcctctcgctgacggggcgtgagcgtatcctatggggcactacaacgggacatttccacgcgcagttcggcctgggcgtgaaattcataatccattaaacttgcaagcgacatgaaaaagatgaaaaagatattggccctggcggtctggatcgccgccctgggtcttttatgcgcatcctgcgacaacgggctggatatacagcaggcgtacacgttctctctggaaacgatgcccgttcagaagcgaatctccgttggtgaaaccgctgaaatccgctgcacgctcgtgcgggaggggagatatgacggcgcacgttacacgatccgctatttccagcccgacgggcgcggtgagttgaggatggacgacggtacggtgttcctgcccaacgaccgctatccgctcgaccgtgaggtgttccgcctctattacacatcgcgcagcgatgaccagcagaccatcgacgtctatgtcgaggacaacacgggtcaggtcgtgaagacctccttcacgttccagagcgagaacgggacggaggaaacggaacgataacggaatatgtctaaccaagagaagcgcccgtcacccgggcgctttccataaatactgaaaaccatgacagagcaagagagaatagatatagcctatctcgatacgggggtgtacgagaacccgtggcgtgagaaccttttcgagacgctgcccgaggatcggaaaacggcggaggtctgccgtttcgccatcaagaaatcggctttcaacatcgagttcgttcccgaagcgatgaaaacgccggaactttgtcttgccgcggccggctaccggggcgaaacactgaaattcgtccctgaccgtctgaagacaccgaaaatgtgccgtgccgccgtcgatagcaacagctacgcgctgtattacgttccggaggggttgaagacccccgaactgtgcatggcggccgtgaagcgcaacggcctggtgctggaggccgttcccggggaattgaggacgccgcaaatatgccgtgcggcgttgaaagcggtggacagtgccgattacaagatactcccttacattccgtatcccgatatatgcctggaagggctgaaaaaattcgggatgtcgttcgtggacaagttcgagattttcgcctccattgccccggaggtcatgaccggggagctggcccttcacggcgtggggatggacgcgtcctgcctttcgctcgtgccggtggaactgcgcacggaggcagtctgcctgcgtgccgtcagtggggacggcatcctgctccatgaagtgccggaggaattacgcacggaacgggtctgcgaggctgccgtgtcctcgaactacctggcactggagtacgttccgaagcatctgaaaaccgaccgtctgtgcgagatagcgctggagcgcgatcccctggccatccgctttttcaaccccgaacagctcacgccggaggtctgcaaccgggcgttggcccgtgccgacgacctgcgtgtcctccgctatatccctttcgaggatatacacatgaaggcgttggggttctattgcacgaattacgagaagaccttcgattttttgcagcacatgaacccggcacacgtcacgccgagggtggcccgggagatcttcgccctggagccggagctgttctacaaccttcccgaccacgccaagaacgaggagatgtgccgccgggccgtctggcacgacgggagctacctgcaatatgtccccgagaagtggaaaacgccggagttgtgcatggaggccatacggcgcagtccctatgccatcgcccacctgcccgagagcatgaaaagcccggatctatacatgagcctagtgcgggagaacccgcaaaacctgaaaggcgtcccccgcgaagcccggacgccggagatgagccgggaggctttcgagcgtacctacgggaaggacaaaaccgatttctcggttatcagcgcgttgagcgaccccgccctggtcttgcaggtgttccgcgagcaggacgacccgcagaagatacaccggttgatgagtgtcctgcacctgaaccgccggcttgtaacggaggaggtggcgttggaggccgttcgcaaggatgcgggggtgctgtatgacattccccagacggccatcacgccgctcgtggccgatacggccgtgcggggcgacccgaggatgatccagtgggttccgagggagcttcgcacggcggatctgtgcctctatgccgaggccgcccatccagagttgcgggtttacgttcccgacgagatagcgaagggacgtaatatctattcgttccaccgtcaggtggacgcgaaattgcggcagccgctcgaatacgaacaatacaagaccctctactcgggcggcgcggtgcgtgtgaacaacgtgtggacgtcggttgcgggtgagattgattgctgcgaggtgcgttacgaccgtaagacggagaaactcaaactgcggatcgtcgaaccgcccagggagaagaaggcgcagccgaaggtcgcgccccgcaaacccgcccgggggccgaaattgtaggacggcgggtagttctttggcaggaaggttgttaaaaatcgcacgtgttgtcgccgatacccggatgaaatcgttatatttgcaatcgaatcctccggcggcgtgccgccgggcgatttacatacggaaggaacacattatggtggggcattgaaaacagccaaattttaatccgctcgcaaaataatgggtagttctcttctttatcgtcgtgtctatatgcgtcaagcgtatgcgatagcggcgtggggagaaattatctatcgagtggatgggtgcttggctgtacctcaatgccggtatttaacgtattctcacgcctttttcgtatggtatttgtctgaacctaaagaaaagcgatatggaaacgaaatcgacaaatgaggtaaagggtgattacgaccgggtatcggcgagtgaatgcctggggtcgctaatcgagttgcacgggattgttatggaagacgatctgttcgtcattcccgatgcggatggcacggcagtattatacaatgacgggaagatacgttttgacgagatcgccgacatcgaggtcggctcggtgttcgtgggcatcctgctccgcaacggctatctgttctacctttcccgtaccgaaccgctcaagacgtgcatatacacgcatggcgggtggggttcaatctctgaaatttctccccgtggcattgccggacatatcgggcgtgaactgcacgggaagctgggcgaccatacggcggtcgattgacgggaaacaaaaaaatcggacggttgttatcgtccgatttttttcgcgtcgtattttcacggccgttgcctgccgtgttcccgtttccgcctttgcagggcgagcagttgccgcaacatgtaggcatggttttcccccacggtatgccccgagggcatcaggtaaggacttgcgaggcactcccggcattggcgtaccgcctcttttaagtcggtaacggttatttccgctcccgtgatgtctttaatctttgtttccattcttgtcctgttttttgggttcgtaccaactgtcccggtaattttctcccacgagcgagaaaattccgctcatgccgctttcagcggcgaaatttttggcttcccatataccggaaaactctcccagcagccggtagccgatgaataatttgtacttgcgcatgattttatcgtttttccaggttgataatcggtgtgttcttttgcagccattccttcacgctgtccatgttgtattcggatgtgataaccgccgttcggtcgtcgatttcggtgaagcgcgtagtttcatacccgtcgatccactgcttcagcgtggcaacgccccacacctgcgggtcgtcgaacatggtgttgagccgcccgataccctcgccgaaggttacgagcagcgtttcataggagatttccttgtttacccttaattccgcaacactattacaaatataactttttaagtacctgagcaacaaaaagttgctcaggaatttgccatgtcagatttttcacctatcttagtgttgcaaatcaaaatatgtatcaaacccgacagacatggcaaaggtagcaattaaatccgagaaactcactccttttggaggaatattttcaataatggagcaatttgactccagactctcatctgtaatcgactcaaccctcggtatgagatgcaggctgtatggttatcaatacagcgaaatcatccgttcgcttatgagcgtttatttttgtggcggctcatgcatcgaggatgtcaccactcatctgatgtaccacctttcgcttcatccgacacttcgcacatgcagtgccgacacgattcttagagccataaaggaactgacccaggataacatttcctacacatccgacactggcaagacctacgacttcaacacggcagacaagctgaatacactgctcctcaattgcctattgtccacagggcagctgaaagagggcgaggggtatgacgttgacttcgaccaccagttcatagaggctgagaagtttgatgcgaagcctacatacaagaagttccttggttatcgccctggcgtggcggttattggcaacttgattgtcggcattgagaacagcgacggcaacacaaatgtccgtttccaccagaaggacacgctgaagaggttctttgaaaggtttgaacaaaacaagcttattatcaaccgtttcagagctgattgcggctcgtgttctgaagagatagtggaagagattgctaaacactgcaagaccttctatatccgtgctaaccgatgcagttcgctctacaatgacatctttgccctcagaggttggaagaaagtggaattgggcggcattgagtttgagctggcctccattctcatcgagaaatggaaagggaaggcataccgtcttgtgattcaaagacagaagcggatagacggcgaactcgacctgtgggaaggagaatacacctaccgctgcatccttacaaatgactacgagtcttccgagaaagagattgtcgaattctataacctccgtggagggaaggaacgcatcttcgatgatatgaataacggattcggctggaacaggcttccaaaatcctttatgggagaaaacacggtgtttcttctgcttatggcactcatacgcaacttctataaattcatcatggcgaggcttgacgtgaagaggttcggactcaaagcaacaagccgcatcaagacgtttgtctttaagttcatctctgtgccagccaaatgggtcaggacatcaaggaagtatgtgctgaatatctattcatgcaacaatgcttatgccaatgtgttccagaatgactttggataacaccgacaacttatagtcgtgattttgcgtattgcctcaagtcgcatggtggggtaaggggcatttatatgtctttatggtgacattcgatgcactgtgccccctttttactaacgatgcagattcttttcgcttctgtatcatattaggcgcgtagttgcggatttgaggtttacttcattcgttttcatattctcgctttttacgggcggcttttgccgccccgaaattttttaatcagacaagttccactctaaccctgctcatgttcgcccagaacacgccgttgcagtagtaggcgtagccgttatgccagttgctcctgcggcgtatcacgtcctgctcgggtggtcgtatctcgatactcgtggtgtagatgttgtgtcccacggtaatgacgaggttgcaccttcgccatatctcggaatgggttttgaacccgtttttcccctcgacgagcgcaagggccgtcttgactgcttcccgaacttcccaatcccactccccgaagggtttgagcgggcgtgccatgtagcttttatagatgattttcattgttatattttttttgtagggcggctttcgccgccccgattttataattcgacaatcctttccactctgccgtacaacatggagcgtatgctcgtcttgtccacgcccttgtattccgtgtaatgcccgtactgctttaccacgaatgttttcagtacatcgacaaagttgaaacgataccctaaaagcggaatggagtccttgaaataggtgttatggtttacctcacgggtaatccagtctttctcctcacgggtgagcgttcccccgtcattgagccgtttgcgtaatatgtacgcttttgagcctgcaaggctttcgagtgcgggaacgtcccacgacacgaatttatatgctatttggttcattctattttgtttttgcgggcggctttcgccgccccgatttttatgctgtcattcgtttccgtataagggacatgttccccttcatcagtttcagtatttgcccgtggtatggggtattcttgttacacacgccacggctctgcacgacctccatgcgttttagggacacctctatcgtttcgatacgtttgccgtcgattgtagccgagagtatgagcgagtcggctttcagatagtattcgttggtaaacacgcagtggtgcatggcctcgccctcctgccgtatggcttcaacgctgtccaataccttgatgcggatttccccgtcggaaaactccactccgaaaaaccgtcctttggctttgacaaacgaggcttcctgttccaacgccttgcgccgttcctcctgccgccgttccatttgcatgtgccgccgttttttagccatgtagaggtcatgcgctgcgggcaggtctgcgggacacacgaaatgggcgttatgcaggtctttcccgaaaaatcgcagcaggtcgatgtagtcgcaccattccgtcggtttcccgatagcgtacccgttacggatggcgatacggatggccggccaatagtctgcgatattgcgggaggaacgggcgaaaaatcgcacgagtgccgtttgtcccgctttaagcagcgtttcggccttgttctccgagagcagcaggtggataaggtcgaaaggggttacatcggggagttgtttgccgtaaccgcttcggcgcagttcggggataagccgttgccggggatagatgcgtgtgggcgtgatgttgtatttcccgtcgttctccgcccgcagttccaatgcgctcgaccaactccacccgtgaacgaagaagcccatcgggcgcagccgtgcgaaggttgcggagcgtccgtcgggggcaatccaccgctgtacggcttcgatatgggtgtaaacgggcgtctgtcccactttcgcccaacactcgatatagacgaagcgcaggacttgaaaacccttgcagcgggttacgatgcacaaatactcgtaatcgttgaacttgcggcgcagggtggtttccactttcagcgtggtgtggcagtgcggacactcgcaccctaacagattgtccgtgagttctccgttttcgctctgccacgtgtggccgcactcggtgcaggtgataagtcctttcggcgtgcggcgtccgatatgctcgatgcagttcttgtacccccattcgatttgtgcgggggtaagcggcggcaggtgtttgcttgccgccacgacgttctgttggaattttgttctcggtttcataactaaaatagactgggcattagtttgttatcttcgattttcttgggtttggacttggctttcgccaacttggcgtaggcttcgctctcggccttccgtatggcgttccgccgtgcctcggctttttcctcctcggtcagttcgacggtgtgattgaccactaccttgcaactgacgggtttgccgatgtcgatgtcctcctcgtcgtaatagtggagtgccatagagtatatttcctcgtcggcaaacccgttgcaaccgctctgccgtacttggttgatgatgaaagtgcagcaatcgtcaatgttctttttcgggttggcgtatcggggtgcgaaaagttcgtcctcccgtgcccgtgcgtcgagatagttctgtatcgtcagtttgaaataatctgttccttgtgccatgattttttggtattgtggggcggcgagccaccccgtgttcaacatttattcgtcctttccgagaagccgtcgcacctcgtcctctttggtcttttggaaaatccatcccgctttcttctgcccgtcatgcgtcagccgtgcgttgaagcgtcccccgagtgcgtgaagggcgtccttgacgggcttggtgtccccgaatacggctatcgccttctcggaatagtccacgatgataaacccgccttgcacgctcgtttcagtgcgttccgcccgtttttcgtctttcggctcgggcagacatatattctcctcgtttcctgcgatatatgccagcctgtcgatgtacccttcacgggtgtagtgggtcagtttgcagacactccacccgtatttcggacttttgccgagcgtgaaaacgggatagcggtgttcgttcttggggtcgtattcggagaggtgcgccgtttgcgggaaattggccgccgcctttctcaactccccgaagccgttgcgagaggtggccgaaaagccgagaatgacggtacgcacgcttcgggtggtcgaacactcgtaagaggggtcagtgtattccgtttcgttgagttcggcgatgattacgccctgcaccccttcgggcatgatgcggcgtaacctctgcgctcctatttccgctatgcggtcatgctcggctttctctttggcggcggcgatggcctgcgccgtggcttgctcttccgcctgcctcacgagcaaagccacctcgaaagcgtccatgaactcggggttcacgtcgtcgtagtacctgccgataccgaatgtttgcgagaggggtcgcaaaatgtccgtttggctgatttcctttgtttcggtatcgaccatgtggtacacgtagccacgggcggtgtgttccaccttgtaaacgacgtaacgctttctgctcgcacccgcaccgataccgatgattacctggttttccttgactacctgcacctgcgtgtccgtggtagtcgctccgaataatgaaatgtactttgtcatacctgtaaaaatttagaagatgtgagtgaataggaaatagaaaaagccggttagagccacgagagaaacaaggcaggagaaaatgccccgcaggatgtcataacagaacgtgaagcccaaaacgacccaaataaagtcgataccccacacgtggaagcccaaagccaccgccccgacctttaccgccaacccgacctttgcctttatgccaagtggaaggttggaggatttctgtttccatttatttttctcttcgtttctcataacctttgactttttttttatgccgtagcggagccggtatggatggaatctgtttcggtagcatcaaaaggtgtcggggatagctgctgcaagattttgtcggaaaatacgctcgcccgcagggaaagaggaagattttgcggcaaaccgccccgcggcccgatcttgcagcagcgtgagccccgtaactacctttgctactgacaacagatttccataccgcgctccgcggcatgaaaaaaaagagaggaaaaggttatgggggagaaacggggagaaaacgatatgccgtgaacgctcgcgaaagtcggttcacggctcaccctgcatggaatgataaatcgcccgcgaacatttcctttcacgggcgattggcgtatcggaacgtgccgatcccgtatcggcggaggatcgtttccgccggacgtggcgccactcgctgccacttttaagacggatacgtccatataccactggctgataacaagatactgttcatttgtgtacttttgggcatccgggaaacaaaaaatgaaacagaacatggaaataataagtatggacgtgaaggctttcgacgcgctggcagggcacgtggaagccattgaaagaaaagccgaggcgttatgccgcaggcaagaggacgtgagtttgaaaaaatggctggacaaccaggatgtctgtgacgtgctgggtatatcgaaacgtaccctgcaaacctaccgggagaaagggttgctgcctttcagccgcatccgtcacaaaatcttctacaaaccggaagatgtcgggaaactgctgcaatcgtcgcactatcctaataccgccgcgttatgagccattatttcatcgacaagcacgatccgcgtgtggcggatctcttccggcgcttggaaaaggccggcaaggcactggataaactggaatcctccggaggccggacactcaagggagagcggttcgtcaccgacgaggaattgtcccggctgctgaaaatcagcaggcgtacattgcaggaataccgcacggcgcggatcattccctattatttgattcagggcaaggtactatacatggaatccgagatacagaaattcctggaagattcccggaagaaatgtatcgggggacaggaatgggtataaaagaagaacggccaaaacgttggccgttcttctttttcagttcaatatcgtgttcatgccggggagctgccagacgacagcggtcgtcgtggcccttcggacaagccaccgtcggaaggcttcggcattcccggattttaagcggaaagccagcgcggcgatcatttcgagcgaatacagctcgacaataccgccgtcacggttgcgctcccggcggtaaaccctctcctcacagagtatgccgcttttgagtatggagcggatgttgctccccacggcaggaacgaagactccgaacaggtcggcaatctggtggcgcgtgagccatacacggttctccggcgcgtggatttccacccgcccgttttcaatgctgataggttctcttgtcgtcatagtcatacaaatttatcaatttttgttatactgttcaaccgtttaccgttataatatctgccgtttccggttcgtcctcctcgtagagatttattttccggcctttggtctgttctttcagccgtttcatgtcctcgtccaccttgcggtcggtcactttggcgtaaatctgcgtggtggaaatgctcttgtgtcccatcatgcggctgacagtttcgataggcacacccaacgagagcgtgatatgtgtcccgaaattgtgcctcgccttgtgaaaggtcatgtcgaagccgtatgtccgtcccagttctctggtgagcttgatgagatacccccggcaatagaggttgaaaatcctgtcgcttttacgctcgtggcggtatttctcgatgatctgcaacggcacgttcagcaggcggatggccgagggcgtttcggtcttctggcgccggatgtgtatccagtacgttccgtcgtccgactgcgtgatgtctttttcggacaagcgtttcaggtcggcgtaggacaaccccgtgaaggtagcgaagagaaaccagtcccgcacccgctggaggttgggtttatcgacgggagtttccatcagctttttgaggtcttcgagtttcaaatggcggctcttgcgccggggcagttccgggtgcagcttcccgtaagggtcgcgccggagtgtaccctgactgacagcccgcttggtcattttcttcaaccggtaaagatgctcgtgtactgtcttgggtttcatttcacgatctgtacgtaggaatatttcaaaatcatcgtagaactcccggtcaaggctccgcaacgctacatcctccttttccttcctttttttcacgaaggaggctaaaatattataggagttctcgtaactttcataggtttcttccttgcgatccacgccgacacgcttgcggaactcctcgttatgctcgcggaacaaggcaaggagggtgaacggtttctgcccgattccttccacggcgtttttgaccagctcggccgtcacgaaaccgaggcttttacgaatatgacggtaatgcccggtgattttttcggtcagtttctctattgccaggtttaccgttcgggcgttctcgcttcgtccgttcgcccttttggtttccggattccaaagcgatggatcgacaaacgcgttgatattgatcggggccgacttggcgtcgatgcttaccttgcataacaatttacatgttccgtccttgcggactttcgtgcggttgatgtagaacagcagggagaacgtgctgcgacgttttatctctttattattcgtttccataatcgttgtgaatttgattgtcaatgatagattaaatagctacggagaagcggccggcaatcttttcctctaaagaccgggtatccatgtcgatcttgtcatcggtcactttggcgtaaatctgcgtcgtggaaatgcggctatgccccagcattttactgacggtttcaagcgggacaccatgcgaaagcgtgatctcggtggcgtaggtatggcgtccgcagtgaaagacgagcttccgttcaattccgcaaatggcggcaatacgtttcagtgtccggttgagttcgttgttgctgtacatcggcagcagttttccttccggggccatatcccggtacttgtcgaggatgagcaacggtatgtcgagcaatggcacttcatagtcgattttcgtcttcttgcgggcggtcttgatccatacctcaccgtcctcggccacttccagatcctccgtcgtcaggcggcacatgtccccgtaagggatacccgtgtagcaggagaagaggaacaggtcgcggatatggtagagtttcgggtcgtgcaggggtgtggtcatcagccgttgtaactccgctgcggtaaggtatttctgttcccgctcgggatgttcggcttcataacccgcgaacgggtcggcagtgataatcccttccgcgatggcttccccgacaatcgtgttcaaccgtgtgacaagcaacacgatagttcccagggcaaagcggcgctccgtgcgtaggtagaggtcatagttgtcgatgaatgaacggttcagggccgtgaaaggaacatccgacaacttgtatttctcctggatgaaagcggccacacagttacaagcatagcggtaagattgcgctgttcccttttcccggttcacgccgacacgtttttcgaaatgttcgatgaacgtccggaaataacccaacagggtttcctgcccgaaagccgtccccaacaacagattccttatttcttcagccgttacattctcacgggtggctgacagttcgtcataaatggaaatggctgaagctcgcaaatcgtccagttgccggttgatttcccgcgcggcgttacttttacccgtggcacgtccggatgcccacagtgcagcgggtacggacattttcgcactaaaagccgcttctgaaaatttgccgacaacaagtttcgccatgaccgggcaatgtccctcgtcattcatttcgctctttttgaggtagaacgtaaccgttacatccgtctgtttcataactctattttttatgttgcaaaattacttgatatagagttatttacagttatgaaaattatagcggaacaaagaataaaaccccggatgccggtaacataacctgtatttccatgaaaaacggaaaaaaacggttatctttacgggcaaaatatagggttctttgcatggtgaacggtaaaaccgcaggtggttaagcgttattttgccggattatccggggctaaaaaaggcaacggataagtagcaaatctttctcttaacctttcattatcctgcattttagcgatttggaaaggtatagaagaatttggcttaactctcctcaataccaaacacttactttatttatccaaattttgccgtttttttgcgagttctttgtatatttgcaacaatatgttttatcgttaaaatagttgcaacagaaataatacacataaaagaaaaacagagcaaatagaaaatgaagcgagttattaacctggacaattggaatagaaaagagcattttaaattcttctcggctctcgatgaccctttttggggaattactacgactgttgatttcacaagcgtatatcaacaaagtaaaaatatggaggtttctttttttctttattctgtgtacttcctattgaaatgtatcaatgcaactactgcattcaaattacgtatagaaaacggagaagtagtagaatatgataaaatcaatatttcgcccactatcggaagagaggacggaacttttggctttggattttttgagtatgacacagatctttccttatttattgaaaatgcagaaaaggaaatacatagagtaaaaaacagtgccggactttctttttccaaggacactgcaagagcagatgtcatccgttattcggctctgccttggtttgccttttccgagatgaaacatgccggttcaattcaaacaggagattctatacccaaaatttccacaggtaagctgatacaagaaaaaaagaaacttttgctccctatatccatcagtgtccaccatggcttggtggatggacgaaatattgccgaatttatacagaacttaaaagacggacaaaacaatacattatgatatgattgctccctcttcctattctaataataaaacatgaaaaataaaatagaatttatcgcttttgatgccgatgacactctttgggaaaatgaactttattttcaagagttggaacacagattttgtcatcttctgaggaaatatttaccagctccttccatatcagaagaactgttcaaaacagaaataaaaaatctggatatctatggttatggactgaaaggaatgctgctttgcatgattgaaaccatttgcaaagttactaatggagaaggagatctcaatctcgtaaaagaaatcctccgatcaggccaggaacttctgcaaaggccaatcatattattggacggtgtgcaagaagtcatatcagccttgtgcgaaaattataaattagtattggccaccaaaggtgatctgttcgatcaaaaaagaaagatttctgcgtccggactacaagaatgtttttgccacatagaaataatgagcgacaagaagaatgcggattataaaagattgcttgataatttagggtgtaaggcagaaaatttactgatgataggaaactcaataaagtcagatattattcccatattggaactcggaggttatgcagcctatgtacctcatcatatcacttgggcacacgaacaatgtgaaggagaagtaacgcactcccactttattaagttgaataacattaaagagatacaaaactatctttagtttttgccatattccattctccacgtggcaactctttgaacaaaaataccacatctggcaagaatcaaaaaaagataagtcactctaatacaacaaaaaggagaaatgctttgcatttctccttttcatcaaaaaaatcacacatttaaaacccaatacttaatccggctatcagataagttttgtcaaatgagggcgaaacaatagcctgtacaaacaaaggcaaagaaaaattatctgtaatattaatgttcttggaagcttttaaagcaatatctgtaaaagcagcaccatcagcatcatacattcctttccaaggagtgaaaccaacggaaggagtgagcgtaatttctgccgggcaagcaatattataagaagcattgatataagtggaataagcacgatcaccgtctttgttatcgtctcctcccgcaaacatagtagaccaactcaaggtcagaggaaagttctcgccgaaattataagctaatgttccttcaaaatgatgatcatgcttataatccccgtagggcatggtgatgccattccaccaatagtcggttactgtaatacctaaaccgccaatagtatagcttaaattgatgtcaaactcttgtgcaccgtctgtcttggtcaggctctgactcccccaagcagataaagaaaggttgccgtaagataatcctaatgtaggctgtacagaaaatcctgaattctggtaagcgccacgccaaatgtaatcacttacaaaatctgccttagccgttacgttaaattcttgtgcttttatcactccaggcaacagtaaagccagcaccaagaccacttttttcaaattccttttcatcttaaaaaattaaactaattaatattcgtgttttacatatttctactatttccttcttattgtctgaaaggaaatatccattttgagtttttctgaatcaagatgcatcattcaatggtgatgcacgtcaaagatcaagaatccatgttatcaaagcaaagaacaatacaatgatagccacagcttctagagccgacaggctctcggtatccaggaaacttctctttttcatgacgcacatcttcctaatttaatgactatatatttttattattttgccttttctaaagcagcattcagttttaacacattcaccttctctgtaccgaacatgcccataaacggtttttccacagctttatctacaatagcttttacagtttcctcactcattccgcgagctttagccacacgttgtacctgcacgtatgcgcaggccggagtgatgtcaggatccaatccggaaccgctggctgttaccatttcggcaggtacttccttacggctcaagtaaggatgatgctttaaaaatgtatcaatccgagcttctacttcagccagatactcctcattggtaggacctttattgctaccggccgaactagccgcatcataaccttcaccagcacatgaaggacgtccccagaaatagatatcttctgtaaataattgtcccacattggctgcacctaccacttttccgttaagttccacaacctcggcattgccggaattaggtccggcaaattgagcgaaaatccataagactagtatatagcatactgagaaaaacacacaaaagactaaagtaagtctgaatgactttataaaatttttcattgttatttacttgttaaaagaataatcctactactaaatctattaatttaatacccacaaaaggagcaataacaccacctatgccatatatcaaaagattacgacgaagcaaggcggaagctcctatcggtttgtattgaactcctttcaatgccagcggaatcagaataggaataatgatggcattgaatataactgcagataagatagcactctcagggctatgcaaccccataatattcaatgcagccagttctggaatggaaagcatgaacaatgcaggaacaatggcaaaatatttggccacatcattggctatggagaaagtggtcagtgtaccacgtgtcatcagcaattgtttacctatctcaacaatttctatcagcttggtaggatcattatccaaatccaccatattccctgcttccttggcagcctgtgtaccgctattcatggcaacccccacattagcttgggcaagggcaggagcatcatttgttccgtcacccatcatggcaaccagtttgccggcagcctgctctttcttgatatactccatcttatcctccggtttagcttcggctatgaagtcgtctactccggctttctctgcaatatatttggcggtcaaagggttatctcccgtcaccatgactgtttttacccccatcttgcgtaaacgttcaaaacgttcctgaatacccggttttatgatatcctgcaattctataactccggcaattttcttattgacactcaccaccaatggagtacctccattacttgtaatggtttgaatgatatcttccgtttcttttgggaaagggtttccggcagacaaagctatcttgcggatagcatcaaatgcacctttacggatttctgttccatccttcaagttaatacccgagcatttggtttcggcggtaaattttatcatatgagcaccatcggtattcaaattacgcatccgtaaacccgattcacgtcccagttcaataatagatttaccttccggagtatcatcagatacagatgagagtaggcaggcttcgatgaaagcatgttcatccactccctgagccggataaaaacgagtagctttacggtttcctatagttattgttcctgttttatcaagaagcaaagtatctatatctccggctgtttccactgctttacccgatttggttatgacgttggcacgcagagcacgatccatcccggcgataccgatagccgaaagcaatcctccgatagtggtgggaatgaggcagacaaacaaggacagaaaagaagcaatggtaatgacagttcccgtataatcggcaaacggtttaagggtgatacacacaatgacaaagaccaatgtaaatgctgccaacaggatagtcaatgcaatttcattcggtgttttctggcgggatgcgccttccaccaatgcaatcatcttatccaagaaactttcacccggctgggtgcttaccattacttttatctgatcggacaatacttttgtacctcctgttactgaactcttgtcaccgcctgcttcacggattacaggagcggattcgcctgtgatggcactttcgtcaatagacgccagtccttcgatgatctcgccatcggcaggaataacatctcctgcctcacatacaaaaatatcacctttctttaactgggaactactgacagttttcaaagtcccgttcacaatcaatttggcaggagtctcctcacgagtcttcctcaggctatcggcttgtgcttttccgcgcgcttcggcaatagcttcagcaaaattagcaaataacaaggtgatgaacagaattacgaaaacccataaattataaataaatgagccttgtgaatcattaacgatagagtagagcatcaccaagaacataatagctgtacaaacctctaccgtgaacataatcggattcttaatcatcactcgcggattcaacttcacgaatgattgttttatgctgtcaataacttgctccttctgaaataaagaagctgatttattatctttcatatcttctattaatatcgttgtctgttatcagaattataaactcaagtgctcggcaatagtgcttaatgcatgtaccgggaagaatgatagtgcggcaacaataaaaataaccgcaaatgtcatcacaccgaatgtcactgtatcggtttgcaatgtgccggcgctttcgggaataaattttttcttagccagaatacctgctatggccacttgacctacaatcgggacaaaacgtcctaatatcagcacaataccacaagagtagttccaaaaccatgtgttatcacccagtccttcaaaaccggaaccattattggcggcacacgaggtgtattcataaagcatttcactcagaccatgatatccgggattgttcaaccagccaccttcactttccacaaatgcaggcgcatgaacaaacagataagcagccaatgctgtaccaactaaaatgataaacggatgaagtagtgctacaatggaagcaatcttcatttcacgtgcttctactttatgaccaagaaactccggtgtacggcctaccatcaacccactgatgaacacggcgataataataaatgtaaagtagttcatccatcccacacctacaccgccaaaccatgtgttgatctgcatgttcagcatttccatcatacccgaaagcggcattgttgaatcgtgcataccattgacagaaccattggaagtaaccgtagtagtaatactccacaaagcagtggcggccgagcccaaacgtatttctttaccttccatcgcgccattatcctgcgctatccccatctcatcaatacgtggattaccacccatctcctgactgacattgatacaaactcctaccagataagcaaacagcatgacaccatatatactataacccaattttttacgtttcagatagaaaccgaatgcaaatgccatcgccataggtatgataaggatagaccaacattccaccatattagcaaaataggtagggttctccaagggatgagaagagtttacaccaaaataaccacccccattagtacccaattgtttgatagggacaatagccgccgtagggccttgtgatacatattgtgtagttccttccatggtggtcaccttcatttttccgtcaaagcccatcggagtgccttgcacaatcaggataaaacctacgatcaatgaaagaggcaacaggacacgggtacaacttaataccaaatagttccagaaattgccaatagtctgagtagtctttgcagccagcgctttcattatacctgccatggcagccataccggtagcggcagtaataaactgaaagagcatgatgacgaatagctgagtaaaataagtcagcccactttcaccgctataatgttgcaagttacagttcaccatgaaactgatacaagtattgaatgcctgatgcgcagtctgaccggcatttccatccgggttaagcggcagcacaccttgtgtaaccaacagtaccatcccccaaaggaaccaaaatagatttaccaccagcaaggctctcaaaaactgtttccagttcatctcctcattgggattgataccactcagtttgaacataacccgttcaacgggcttcataaaatccgaccaagtcttttcacctttataaactttagcgatatatttgcccaaaggatagctaagcactatcaataagacaatttgcgctataacacctaaaacttcagtattcataactctttatttcttaacttacttttttaaaacttctccggcttgataagaacatacatcatatagccgaacataatcaaactaactacaaataatgctgtgtacataacttgtttctcctttctttttttagatcttctcgaaccagtctatacatttaaagaaaagccaaaagcaagctatgccgctcaaggtacaaaccgcaaatccgattgaaaataaatccataattcctttttttaaattaatactattgttaactgccacgctatatgccaatagtgtgccattactggcaaacaggagataagtaattgatttatatacagatataacaacaagaaaaaagagggagcaaaagaagatcttttcaaaatgaaaagggaaggatatcaaaacaggagaataattgatttatttgctgccaaactgcataattccccaatttattatatagctttgtatagaggttttaatacagaaaaacagaaaggaaaaatgaaaaagataaatgttaccgtagccgatatcactactttaaaagtcgacgccattgtaaatgcagccaacagttcgttgctgggtggtggcggtgtagatggagctatccatcgggctgcaggtccggcgttgttagcggaatgcaaaacattgggcggttgtccgacaggggaaagcaagataaccgatgcatacaacctgccatgcaggaaagtaattcatactgtagggcccgtatggcatgggggaacgcatggagaagccgaaaaacttgcatcatgttatcgtaccagttttatactagcgagagaaaacggcatccaaagcattgcattcccctgtatcagtaccggcgtatatcattatcccaaggaagaagcggcacgtatcgcattgaatgccatcggggaagaaatggcacatggctatgaaggagaagtgattgtatgctgtttctcggaagaagatgctgaagtatatcgagagctcctgtcttgctgaggaaagccacgggggatttctaaaatccgtactataccgattccatttccatctttgctgaaactgtgacggacagaagagtgtagtaagtgttccagcttgtgaaacgctaccgtatggtctttcatacctgatactaagctctttcttccttatggttaagcccattcttacggttacatactatagtcgccggcatcgctccgtacagtccactgcaatggactgtacggactgccccggtggactgtacagtccaccggaagaaactgtagcagcaaaccataagagtgggcttagccataaggaggaaacggcttaatcaatggtactcaataactaaataccgtattcctctatttttctatataaagtagtcaaacctattttcaataaacgtgaagcctcagtcttgtttcctttagtatgttgcagaactttagcaatatgacgtttttccatagcggccagttcaaactccgaataattcttgccggaataatcttcctgtcgggtattctgtatttcaataggaagatcttgtaaggtaagctgtttgtcgcagacaatcatgctgcgttctatcacgtttcgcaattcacggatatttcctctccagtcggcagctttcaaagcattcaagaactccggagccatcccttccacttgtttccccagtttttttgaaaagagttggataaagcttcccgccaaaagttcgatgtcttctttgcgctcacgaagaggagggaggtgtatctgaaaaacagaaagacgataataaagatcttcacggaaattaccttgttctatttcttttttcaggtcccgattggtggcggagataacgcggacattcactttcgtcggtttcgtgtcgcctatcttgatgtactctcccgcttcgagcacacgaagcaatttggcctgcagctcgaaagccatttcacctatttcatccaaaaagatggttccgttatcggccacttcgaacagccccttcttatctttcatcgctccggtaaacgaaccggctttatgaccgaatatctcgctttcaagcagatctttgctaaaagcagaacagtttacagccacaaaagcattctctttgcgaagactgttgcgatggatggcttgtgcaaagacttctttccccgtgcctgtttctccggtcagcaagactgtaacatccgttgccgaaacctttcgggccaatgctacggcttgttgcataccctctgacttcccttttatagcgtcaaaagagaaactttgggtttcttctgttttcactttttcccctacattctttttagcctgagccatagcccggctgattaacggaataattttattattatcatcccctttggtgatataatcaaaggctccattcttgattgcctgcacaccatccggaatattaccgtgggcggtcaaaagtatcacctccaattctggatagagttttttgatggttgtaaccatatccactccattgccgtccggcaaaaacacatcacacaacaccacttggggattatgtaacttaagttgtttcaatgtagactggcaatcggctgcctggaatacttcgtaaccttccaattccatcatacgcgaaagaagtttgcgtatttgcggttcatcatcaataattaaaatactatccatatatttattctgttttgcgggacaaagatagaataaaatgaacgctcgacaaaaggataatacttaatttctgttttatagaaaacgctttctgattatcttttttaatctcggattttctgaaccactcccgtagggagtaaacaataacaagctgtaagaaacatatttactgatcaattaaactcatcttataatgaacctttttatattttgtttcgttaaatataccggatgacatctcaatttacttccgtcaattcctccctattcttaattaatttaaactattatagactatgaacaaaatagaaataaaagacttatatcttgttttcggtccggaaaagcagaaagcgttccggatgttgaaagaaagaaaaagcaaaaatgaaattttaaaggcgactaattgtactgtagcagttaaaaacgccaatctgacaatcaaagaaggagaattcttcgtaatcatggggctatcgggtagtggcaaatcaactttattgcgctgcataaaccgattaatcaaacccacaaaaggacaagtactgattaatggaacagatattactgccgcatctgataaggaattgttggaaatgcgtcgccgggagatagctatggtgttccaaaattttggtttgttacctcatcgcagtgttttaagcaatattgcattcggtcttgaactccaaggagttcccaaacaagaacgtgagaaaaaagccatgaagagtatggaaatagtcgggctgaaaggatatcagaatcagatggtcggacaactttccggcggaatgcagcaacgtgtcgggttggcacgcgctttggcaaatgatccggaaatattactgatggatgaagccttttccgctttggacccattgatccgcgtacaaatgcaagatgaaatgctggcgctgcaatccaaaatgaaaaagaccatcgtctttatcacgcatgatttgagcgaagcaattaaactgggtgaccgcattgccattatgagagacggagaagtggtgcaagtcggaacttcagaagaaattttaacagaaccagccaatgactatgtggcaagatttatagaaaatgtggaccggagcaaaatcataacggcaggaagtattatgataacccgtcccgccgtagcccgtctgcgtaaagaaggtcccgaggttctgatcagaaagatgaaagaaagagatattaccgtgcttcctgtgatagatgaaaatgacaagctgataggagagattacattggaaagtgccgccattcttcggcataaaggtataaaatcaatcaaggaagccgtacaaagtgaagtacattccgttacggaggacacaaagattgaggatctgcttcccttaattacgaaaaccaattctcccatttatgtggtaaatgaagaacgcgaactgaaaggcttggttcctctatcgtccatcgtagtagagatgaccggaaaagataaagaagaaattaatgaacttattcaaaacgctatcgaattatgataaacataggaaaatatatagaaacagccatcaactggctcacagaaaactttgcccctcttttcgacgccatcaatgttggaataggcgggttcatagatgggttccaaaacatattgatgtggatacctttttatgtaacaatagcattgctggccatcctggcttggtataaatcgggaaaaggagtcagcatttttaccattttaggattattactgatttggggaatgggattttggaacgaaaccatgcagactttagcattggtgctttcgtctaccatcatcgctcttatcatgggacttccattgggaatatggagcgcaaacagcaaacgatgtgataaaattctgcatcctatcctcgacctgatgcaaacgatgcctgctttcgtctatctgattcctgccgtactctttttcgggctgggaaccgttccgggagcttttgccaccattatttttgccatgcctcccgtagtgcgtctgaccagcctgggtatcaagcaagtaccgaagaatgttatagaagcttcgcgctcttttggtgcgacacctatgcaattattattcaaggtacaattaccgctggcattgcccaccatcatgaccggtataaaccagacaatcctaatgtcgctctccatggtggtcattgccgctatgattgcagccggagggttaggggaaatcgtattgaaaggtatcacgcagatgaaaataggtttaggtttcgaaggcggtatcgcagtagtcatcctagccatcattctggatagaataacacaaggacttggaaaacaaaagaaagggaaataagcatgaagaaaatactatattttttgtctttcctcctgttgcttacctcttgcagcgggaaaaaagatgataagacaataagcattggatacataaactgggacgatggcatcgctctgacctatttaacggaagtgattcttgaacaacaaggttatcatgtcattttaaagaatgctgatccagctcctatctatgcaacaatggcccgtggcaaagtagatttgctgatggatgcttggttaccagccacacaggccgattatatgaaacaatacggaaagaatctggaaatcttaggcaagatctatccagatgcccgtatcggtctggtagtccccgattatgtggacattcattctattgaccaattaaatgccaacaaagaaaaattcggaggcgagattatcggcattgatgccggcgcagggattatgcatgctgcagatatggccatagaaaaatacaatctggattacaaattgctggagtctagcggaccggctatgaccgcagtactaaaaagagccattgacgaacatcaatggattgtggtgacgggatggactccccattggatgttcacccgctttaaattaaaatttttagaagacccgaaaggcatttttggtaaagcggaaacaattacagccattgcctgcaaaggatttggtgagcaacacccgtttgtggtaaaactgatagaaaacatacatctgagcaccgaagaaatcagcagcttgctggatgatgtatcacaaaatgaatataatgaaaaagaaggagcggaaaaatgggtaaaagaacatcaggagctggtagattcctggattccccagaaatagaaatatctcacttaccttgagggccgcgcccaaggtaagtgagaaaacaaacgaactttgtatcagctcaactatgccatatattttgataagtttctcgaaaacaaaacctatctttgcaacataataaaacacatataaattatgaatgtaatcaaatcaaggttcgtctatcacttaatggcaataatcactgtagctatctgggggactacttttgtttctactaagattctaatccaacatggattaagtccttccgacatcttcttttatcgtttcactctggcctatctttgtatgtggtgtatttcttataaaaaactatttgccaatagaataaaagatgaattgttacttttattggccggattatgtggaggaactatttatttcattactgaaaatacggctctcggtatcacattagcctccaacgtgtctctgatagtatgcacatcacctgttctgaccacactactttcttatttgttcagaagaaaagaacctttcacccgccatcttgtttacggatcgatcatggctttgataggagtggggctagttgttttcaacggcagtttcattctgaaaattaatcctttgggagatattctttcactgaccgctgcattgatgtgggcattttattgccttattctcaaacaattggataatcattattctatcgtattcattacccgtaaagtattcttctacggagtgctgaccattctgcccatgtttttattccgtccgttaaattgggacaatgtcttgatgatgcaacccatcgtgtttggaaatcttctctttttgggatttgtcgcctccatgctctgcttcatagcctggaatgcatgtgtcaaggaattgggagccgtaaaaagtacaaactatatttatatcgtccctttggtaactcttcttacttcagcggtcattattaatgaaaaaataacttggatagcccttaccggctgttttcttatcttgtgtggtgtatatttggcagaacggaaaacaaatcctacatttgaggcgaaatcttaaagccctttaattatgaacgagatagacaaaatgcgtaacagtcagctggccgatatggagaaaccggaaatacaggccagtttcatacacgccaaaaaactagtggcccaattacggatgatgagtacatacgatgatggtttcagggaagtgctggaagaattagtgccgggtatcccttccacttctgtcatctgtccaccattttactgtgatcatggacacggcatccgcttaggagagcatgtctttgtgaatgccaactgtacatttttagacggtggatatatcaccataggagcacatacattgataggacccaatgtacagatctatactccacatcatccggtagattacataacccgacgcgaacccaaagagtatgcatatcccgtaactatcggagaagattgctggataggaggaggagctattctttgtcccggagtaaaaataggtcatcgctgtattatcggagctggaagtgtcgtaactaaagacattcccgacaattccgttgctgtaggtaatccagccaaagtgattagaaaagttgattaaaaaaagagaacagataattatgaaagttttggccccacataattatctgtttctcgtattcagccaatataaacattgacgctcagaaacaggcaatcgtctccgttagaacattcaaagtctattttattctctctggccagccaacctatagctgcattcaaatctctgtcagacaactctgaagctctttttaaatcacaataactccaccgtttattgtcattcagcagtttccaaacttttcctgcgtttactccaatttgatgtttatccattttgatgttcaattaaagaagttaataatagaatgcttagttttttgcggtaaatataaccttttattaaaataaaatagactctcctacataaaattcatgtaaaagacatgattatttaacatttgtttctgtcaaatttcatgtaaattctctttttatgaagatatttattgccggatgagccatttttacaaatatttcctctaactttgtaagtcaattaatcctttgatatgaaaagaaataaaataaactggagagtgcccaaaggtatggaactcacagagttagataaaaaggttctctattatcaagatagaggtcatttggtgccttcacgtgaactgattaagacaccagaacagattgaaggaatacgccgtagcggtattatcaataccggagtgctagaccttgtagaacgcgagatccatgcaggcatgagcacattggaaatagacaaactagtttatgaatacactaaagatcatggcggcattcctgcaaccttaggctatgaaggttttccaaaaagttgctgcacctctatcaatgaggttgtttgtcacggtattcctaatgaattcgacattctggaagaaggagatattatcaatgtggattgtactaccattcttgatggttattatgccgacgcatcgcgtatgtttaccattggaaaaaccacacctcagaaagagaaactggtacgagtagctaaagaatgtttggagataggcatggaagctgcaaaaccatttggttttgtgggagacataggacataccattgaaaaacatgctaaaaaaaatggattctcagtagtgcgtgatctctgcggacacggagtaggcatagagtttcatgaagaaccggatgtagaacattttggaaaaaaaggaactggtatgctattggtcccgggaatggtttttaccattgaaccaatgatcaatatgggaacatgggaagtcttcattgatgaggaagatggctggactgtagtcaccgaagacgaacagccgtctgcacagtgggaacatactttcgttatgacagataacggacttgaaattctgacacattaatatatataattaaggtatagaaatatggatacaattatattaggtatagaatcttcctgtgacgacacatcagccgcagttatcaagaatggcgtattgttgtccaacgtagtgtccagccaggctgttcacgaagcttacggaggggtggttcccgaattggcgtcacgtgcccatcaacaaaacattgtaccggtggtgcacgaagccttaaaaagggcaggagttaccaaggagcaactaagcgccgttgcattcacccgaggacccggcttgatgggatcattactggtcggagtatcttttgcgaaaggtttcgcacgttcattaaatataccaatgattgatgttaaccacctgcaagcccatgtgttagcccatttcattaaagaatcggaagaagacaacaaccaacctaaattccctttcttgtgcctgctggtgtcaggaggaaactcacagataatattggtaaaggcctataataatatggaagttttgggacaaactattgacgatgcagcaggagaagctatcgacaaatgttctaaagtaatgggcttaggttatcccggaggtcctatcattgataaactggcacgtcaaggcaatcccaaagcgttcactttcagtaaaccacatattccggactataactatagcttcagtggactaaagacttctttcctatactctttgcgtgactggttgaaagaagatcccgatttcatcgagcatcataaaaacgacttggctgcttcattagaagcgactattgtagatattttaatggataagctgagaaaagcagccaaaaatctcaaaataaatgaagtggcagtagccggaggggtatcagccaataacgggcttcgtaactcattccgcgaacatgccgggaaatatggttggaatatctatatcccgaagttcagctttactacggataatgctgcaatgatcgcaattaccggttattacaagtacctggacaatgatttttgcactatagacaagcccgcttattcacgggtaactatttaaatatttaaaaaccgttttcaacatgtcagtagaaggtaaatttttaagtaaagagattaacgatttgttttggagagaaggcctgacactcgttactgccgagagttgcacggcaggaagtgtggcggccgctattacagccgttgccggaagttcacacttctttaaaggtggaattatcgcctattccaacgaaataaaggaaaatctgttgggggtaaaccacggaactttagaaactcatggggctgtaagtgaagaaaccgttatcgaaatggtaaaaggggcgatgaaatcgatgaattctgattgtgctgtagcaacttcaggtatcgcagggcccacaggaggtacccccgacaagccggtaggtaccatttggattgctgccggatgtaaagacaaagtgattacactgaaattggaaggcgacgaaggaagaaacaaaaacattgcaaatgcaacccaaaatgcactgcaactgctccgaaagttgttccaaaacgaagaaaatgagcagtaattgcagaattatttgcaaaaactcttgttttatacaaataaaagtgcttattttgcactccgtttgaaataagtattgaaaaaaactataaaaataagatagcaatgtcgaagatttgtcaaattaccggaaagaaagccatgattggcaacaatgtttcacactctaagagaagaaccaaaagaacttttgatgtgaacttgtttactaagaaattctactatgtagaacaagattgctggattagcctgaatatctgcgctaacggcttacgtgtgattaataaaaaaggcttggatgcagcgctgaatgaagcggtaaccaaaggctattgtgattggaaaagcatcaaaattattggttaattaaaaaggagagatagactatggcaaagaaggctaaaggtaatagagtacaggtaatccttgaatgcacagaaatgaaggatagtggtatgccgggaacttctcgttacattacaacaaaaaatagaaaaaataccactgaaagattggaacttaagaagtacaatcctattttgaaaagagtaacagttcacaaagaaattaaataattataacccatggcaaagaaaacagtcgcaacccttcagacaggtaaagaaggacgttcttatactaaggttatcaagatggttaaatctccgaaaacaggagcttacatcttcgatgagcaaatggtacctaacgaaaaagttcaagactttttcaagaaataattcagtcggaagactaatggaaagttcctttcatatattatggaaggaactttttttataccacaatgttatcatcataatacattatgaccaatcattgtgacacttttttttgtccgtgtaagagattagttatatctttgtagcataaacagataaatcagactccaatatgggattttttaattttttctcgaaagaaaagaaggaaactttagacaaaggattgtccaaaaccaaagaaagtgtatttagtaagattgcccgtgccgtagctggtaaatcaaaagtagacgatgaagtattggataatctggaagaagtgcttattacttcggatgtaggcgttgaaacaactctaaatattattaaacgcattgaagaaagagttgccaaagataaatatgtaaacactcaggaactgaacaagattctccgtgaagagatagcggcattattgactgaaaataacacggtggattcggatgatttcactgttccggaaggtaagaagccctatgtcatcatggtggtaggtgtaaacggtgtgggtaaaactacaaccattggcaaattggcatatcaatttaagaaggcgggcaaatccgtctatttgggtgccgctgatacattccgtgctgccgccgtagaacaattggatatttggggagaaagagtaggagtgcctgttattaaacagaaaatgggatcagatcccgcatccgtagcttttgataccttaagctctgccgtagctaataatgcagatgtagtaattattgataccgcaggtcgtcttcacaataaagtaggtttgatgaacgagcttactaaaatcaagaatgtgatgaagaaagttgttgcggacgcacctcacgaagtattgctggttttagacggttctaccggtcaaaacgcatttgaacaagcaaaacagtttactttggctacagaagttactgctatggcaattaccaaattggacggaacagccaaggggggcgttgtaattggcatctcagagcagttcaaaattcccgtaaaatatattggattgggcgaaggtattgaagacatgcaggtattccgcaaaaaagaatttgtagactcactatttggagagactgaataataaatgaaacgtaacacaatagatatcatcaccttagggtgttccaaaaacttagtagactcagaaaagctgatgcgtcagctggaagcaaacggttataaagtaactcatgattccgataaaccgcaaggagaaatcgcagttattaatacatgtggttttatcggcgatgccaaagaggaatcgatcaatatgatattggaattttgtcaggccaaagaagaaggaaaactcaaaaaactatatgtaatgggttgcctttcagaaagatatctaaaagaattggcattggaaattcctcaagtagacaaattctatggtaagtttaattggaatgagttactggcagatttaggcaaagcatacaaggcggaatttgccattgaacggacattaaccactcctcatcactatgcttatctgaaaatatcagaaggctgtgaccgtaaatgttcttattgtgccattcctattattacaggacgccacatttcacgtccgatggaggagattattgatgaagtgaaactacttgtatccgaaggagtaaaggagttccaaattatagcccaagaattgacttactacggcgtagatctatataaaagtcagaaattgcccgaactcatcgaaagaattgctaatgttcccggtgtagaatggatacgtttacactatgcatatccggcgcatttcccggaagaattattccgtgttatgcgcgaacacgataatgtatgcaaatatatggatatcgccctgcaacacattagtgacaatatgctgaataaaatgcgccgacacgtaagtaaagcggaaacctacgaattaatcgaaaaatttcgtcgggaagtacccggtattcacttacgtacaacattaatggtaggacatcccggcgaggctgaagaagattttgaagaattaaaagaattcgtcaaaaaagtacgatttgaccggatgggggcctttgcatactcagaagaagaaggaacattcgccgctaaagaatacgaagattccatttctcatgaagtgaaacaacagcgtttggatgaattaatggcacttcagcaggaaatagccggcgaactgagccaaacgaaaataggtaaagaattcaaagtcattatagaccggaaggaaggagattactacataggcagaacccagtttgactctcctgaggtagatcctgaggtcttgataaaagctgatgacgagtacttaaaaataggtgaattctataaagtgaaaattacagccgccgatgattttgacctatacgccagcattttataggctttttcccatataaagtttggataatgtttgtttttttactaatatagcaaccaaattaacactttaagctttgaataacaaagaatttatatctgaattatcacgtaaactaggatatacaaataaagatacatcacaattggtatcctcagtcattggtgttatgacccaagaattgcaagatggcaacaacattgtaattcagggatttggtacgtttgaggttaagaaaaaattggaaagaatttctattaacccggctactcaacaacgtatgctgattccccccaagttagtgctgacttacaaacccagcgtaaccttaaaagaaaagtttaaataaaatagcccttatttataatattatcatgagcgagaaagtaaccatacaagatatcatcgaacttttggctgagaaacacagcatgactaaaaaagatgctgaaatctttgtcaaaggaatgtttgaactgatagaggaagctctagctactgaaaagtatgtaaaggttaaaggactaggtacgtttaaactcacagaggtggagagtcgtgaaagtgtaaacgtaaatacgggggaaagaattgaaatacagggtcatacaaaaatatcttttaccccggattccagcatgaaagatttaataaataagccatttgctcattttgaaacggttatattaaatgagaataccaaattggaagataccgaaacagaaatagaaggagaggaggaagataccgttgacgaaaacgcgcctaagcctaaacaaacagttgcggctaaagaggttgaactcatagaaacggaaaatacagaagattctccaaatgagaatcccattgccgctgaagacactattccggttattgaggaaacaattattgaagaacctgtaccttctgttgaaatcacaaaggaagagatacaaattatagaaccgggaaaaaaatcggaagatattgtcactgaagcagaaaaggatattgttgttgaaacggctgttccccaaacggtttctcctttagcagaaacaatagaaggaaacaaggtaacagacaaacctcaagaagaagttatgactattgccgatgcagccatactggctgctcataaagcttgtgaagaaaaaacatctttggaaataatagtgccacaagaggcaaccccgtcagaaaaaacggtaactgttacttctaattttgaaaaagaacagaagatagaggagacaacagaagcacaagaaatctcaggagagaaaaagaacagagtttcccggggaattattcttgttatcattttgattgtctgcatcacaggtggcatatattggtatttgcaatcagataaaacttcggatttacaatcgccggctacaataaaaaacacccaagaacaattggaagaggatattcctgcaattccggttaatgactcattaatgcaaggtaaagataccgcaaacatatggacggatgttactagaaaagaaaacatcagtcaatcacaacaggctgtatctcctagtacgaaaaagagttctggcgttgctgtaactgcaaatgttgaaaaagaaactttagccgacactgtagaatatgacataacagggactaaaactaattacacattacgagaaggagagagcctggtaaaattagctgtgaaattctatggtacaaaaaagctatggccctatatcgtgaaacataataaaaacatcattaaagatgccgacagagtacccatagggactactctgcgtattcctgaattaactcctaaaaaataagacttcttgtattttgcctgctttcgacttaaataaagcaggcaaaatacaagaagtaaaaaaagtgcgctcaactgatattctcactctacaaaccttatctttgtattttaaaattctttagcccaataacctttaaaaagtagagatgcactttacttttttaataaaaattagttgccgctgttaattaattaccgtaattttggctgcgttaaatgaacaaggctatttacaagcccgttattagatcaataaagaaacaactaaataaacaaaattatggctgaagcaattgacattcgcgaactaaacgaacgaattgaaagacaaagtgcgttcgtaaccaacttaatgactggtatggaccaggttattgtaggtcagaaacatttggtagaatcattacttatcggtttactgtccgatggtcatatcctgttggaaggtgttccgggtctggcaaagactctggcgatcaaaacgcttgcatctttgattgatgccaagtacagccgaatccagtttactccagacttgctgcccgccgacgttatcggtaccatgatttatagtcagaaagacgaacaattcatagcaaagaaaggtccgatttttgcaaatttcgtattagccgatgaaattaaccgtgccccggctaaagtacagagtgctttgctggaagccatgcaggaacgtcaagtcacactgagcaaggaaacctttatgctacccgaacctttccttgtaatggctactcagaacccgattgaacaggaaggtacctatccgcttcccgaagcccaggtagaccgttttatgctgaaagttattatcgactatccgaagctggaagaagaaaagaaaatcatccgccaaaatattactggagagaaaatcgaagttcgtcccattctgaaagcaacagatattatggaagcccgtaaagtggtgcgccaagtctatctggacgaaaagatagagcaatacatcgctgatatcgtattcgcaacccgtttccctgaaaaatatgacttgaaagaactgaaagacatgattggtttcggtggttcaccgcgtgcatctatcaatttggcattggcagcacgcagttatgcgttcatcaaacgtcgtggttacgtaattcccgaagatgttcgtgcagttgctcacgatgtgcttcgccaccgtatcggcttgacttacgaagcagaggctatgaatatgtcttctgatgaaattgtaagcaaaatcctgaataaagtggaagtaccctaaggaatgtgttctgaggcagttcttaattgcttgacaattaggaagaaaccttggaaacaaaaggttgagtacagagttccacatgggtggaacaccaaatgcatccgtttgaaaaaccattctcgataggagaaaaaacagaaaccgatgcgccggataaataaacaacatagtacgaacagtatggaaacaagtgatttattaaaacgggttcgccagattgaaatcaagacacgcggactttcgaacaatatctttgccggacagtatcactctgcattcaagggcaaaggtatgtcattctcggaagtacgtgaatatcagtatggtgacgacgtacgtgacattgattggaacgtaaccgcccgctacaacaaaccctttgtcaaggtgtttgaagaagagcgcgaattgacggttatgctcttgattgatgtttcgaacagcttggatttcggtacggtgaagcagttgaagaaggatatggtgaccgagattgccgctacattggcattctcggccattcaaaataacgataaaatcggagttattttcttttcagaccggattgagaaattcattccgcctaaaaaaggccgtaaacatattctttatatcatccgtgaactgcttgatttcaagcccgagagcaagcgtacagatataaaaacggctgtggaatatctgaccaacgtaatcaaaaaacgttgcaccacctttatgataagcgactttatagatgaaaacgacttccgcaatgctttgaccattgccaaccggaaacatgatatcgtagctattcaggtatacgaccgccgcatggcagagttacctgatgtgggactgatgaaagtacgcgatgccgaaaccggccacgagcaatggattgacacctcgtcacgagctttgcgtcgcgcacataatgactggtggatacagcgtcagggagtattgaatgaaacatttactaaaagtaatgtggactctgtatctatccgcacggatcaggattatgtgaaatcgttgcttaacttatttgctaaacgaaattaaagaatatgaatatactgaatactagcaaaaagttcttgaaagctggagtttgtgcaattatgctgataacagccggacaggcacaggcacagcaggttacggtagacgccagcattgactcgctgcagcttctcattggcgaacaggctaaagtgaagctggaaatcagcatggatgccaagcaaaaactgcaacttccgttcctacgcgatacattggtaaaaggagtggagatattggatatagccaagcctgatacccagatgctgaacgatggaaagcgtatgctgataaaacaggaatatacaataacttcttttgactcggcactttactatcttcccccattcgaggtgatggtaaacggagagtcttaccggtccaaagcattggccgtaaaagtatattccattccggtagatacgctgcatcccgaacaattcttcggaccgaagaccgttcgcgaagtacctatcacctgggatgacgtatcggccatcgtatggcttaccttgctgatgcttgctttgggcggactagcttactacctgtttgtacgctacaaagataacaagcctatcatcaagaagatcaagattgaaccgaagttgccgccacaccagcaggcgttgaaggaaatagagcgtatcaagggagacaaaaccttgcgtacagccgatccgaagacctattataccgagctgacggatgtactccgtacttatatggaagaacgattcggctttaacgctatggagatgacttcatccgaaattattgataagctacaggaaatcaacgacaaagagtctatcaaggatttgatgtatttgttccagactgccgacttggtgaaattcgccaaacattctccgttgatgaatgaaaacgatatgaatctggtaaacgcagtagactttatcaataatacaaaagtggaaccagacccgaatgcaaagcccgaacctacggaaatcaccgtggaggaaaagcgaagcaaacagggcagaatgattctgctgggcagcatcagcatcattgttattgcgattgtggtaattctatataaggtgctgagtggtgtatataacctctggttttaacaaataaatactaggaacaatgatttttgcaaatattgaatatctatttctgctgattctgctcataccttatataatatggtacgtcatgaagcggaagaaaaccgagcctacgcttcaggtttctaccacacgcatgtacatgaaggcacccaaaagctggaagatttacttgctgcatgctccgttcgtactccgtacggtggctatcatcatggtaatccagatcttggcacgccctcagaccacagacaattggcagaataccgaaatagaaggaatcgacatcatgctagcagtagacgtttctaccagtatgttggccgaagacttgaaacccaaccgcttggaagccgccaaacaagtagcttccgagtttatcaacggccgccccaatgataatatcggtctgaccatctttgccggtgagagttttacccaatgtccgctaacggtagaccatggggtactgctgaatctgttcaacagcattaaaggcgatatcgcccagcgcggactgattgaagatggtactgccatcggtatgggcattgccaatgcggtgacccgtctgaaggacagcaaggctaaatcgaaagtgattattctgctgacggatggtagtaataaccgtggagatatttctccactgacggcagccgagatagctaaacagttcggaatcaggatctacactattggtgtcggtacaaacggaactgctccttatccgatgcagacctacgcagggacgcaatatgtgaatgtccccgtcgagatagacgaaaagactttgaccgagattgcaggtacaacgaacggaaattatttccgtgccaccagcaattccaagctgaaggaagtctatcaggagattgacaaactggagaaaacgaagttgaacgtgaaagaattcagcaaacgcgaagaagaatatcaggtattcgcctggattgctttcttctgcattttgcttgaacttttgttgcgtaactcagtattaaagaaaataccttaaaaaaagaaagtcatgtttcgatttgcagacccgaactttttatatttactcatcctattgccgtttttggtggcgctgtatttgtattccaattatcaccgccgccaaaatattcgcaaatatggtgatccggcattgctgaaagggcttatgccgactatttccaagtatcgtcctgacatcaagttttggctgacttttgctgcgttgacattggttatactgatgttggcccgtccacagttcggctcaaagatggaaacggtgaaacgaagtggagtggaagctgttattgcattagacatttcaaactctatgctggcagaagatgtgactcctagtcgtttggacaaatcaaagaaattgatatccagactggtagatacgttcaataatgataaagtaggattgattgtttttgcaggtgatgctttcacgcaattgcctattacaagcgattatgtttctgccaagatgtttttggaaaccattaacccgtcattaataaccacacaaggtacggatatcggtacggccatccgcctggcaatgaagagttttactccacaagaaggagtgggacgtgcgattattgtcattaccgatggtgagaatcatgaaggtggggcagtagaagcagcccaggaagcagccgaaaaaggtatgcaggtatttgtactaggggtaggttcaccggatggttctccaattccagctgagaatggtagcaacaattttcgtcgcgataaagatggaaatgtcatcgtcacccgcttgaatgagcaaatgtgccaggaaatagccaaggcaggcaatggaatgtatatccgcgtagataataccaactctgccgaaaaggtgttgaacaatgaaattgctaaattgtcaaaagctgatgtagaaagtcaggtttatactgaattcgatgaacagttccaggctttggcatggctggtgcttatcctgctggtggtagaaatgcttattttggaacggaagaatccgcttttcaaaaatgtcagactatttaaataaggaatgcttatgttacaaaaaacctatatcactctgttattcttacttgtggcaagctgtgccttcgcccaaaaaacagaaagagattatctgcgcagtggaaacaagctgtataacgacagtttgtttatcaaagcggaggtagattatcgtaaggcattggaaattaacccgaaatcaacagatgctatgttcaatttgggaaactcgctcttgatgcagcaaaaagcaaaggaagcgatggaacagtttgaatctgcttcaaaagtagaaaaggatagagataaactagcacagatttatcataacatgggagttatccttcagtcgtccaagcagtatccacagtgtatagaggcttataaggaatctttacggaataacccgaaagatgatgaaactcgttacaacttggctttggcacaaaagctgttgaaagaccaacagcaaaatcaagaccagaatcaggataagaatcaagatcaaaaacaaaatcagaaagacgacaaaaaggatcagaacaaagaccagcaagaacaggataagaaagaccaacaaaatcaaaatcagcaacaacagcagcaaaataaggatgaaatgtccaaagaaaatgcccaacaattattgaatgctgtgatgcaagatgaaaagaatgtgcaagataaagttaaaaaacaactgcaaattcaaggaaagaagttggataaagactggtaatttcttaattttggcaaataaaaaaataattagatagcaatgaggaaagtaattctcttattcatattaataacatcggtgctcggagcatgggcagacggaaatgtgacgtttaccgcttctgcgcctgatgtagtagtaagcggggatcagttccggctgacttatacggtcaacactcagaaagtcagggattttcgtgcacctaacatcaaggggttcgatgttttaatgggaccaagccgttcacagcagagtagtacacagattataaatggtaatgttacttctactagctccattacttttacttatattttgatggctgataaagaaggaacttacaccattcctggtgctactattgtggcagacggacaaaacaaaacttcaaattccgtacaaatcaaagtattaccgcctgatcaagcaaatggtgttggaggtggaaacaatagcggtggaagaacttcttcacgcagtcaggttgccggaagcaaaataaccaatcaagatttgtttattaccgcaacagcaagtaagactactgtttatgaacaggaagccatcttgttgacttataaagtttatacactggtaaatctgagacagttgtacggaaaaatgccggatttgaagaatttccatacacaagaagtagaacttccccaacaaaagacattctctttggaacattataacggaagaaactataacactactgtgtggagtcagtatgtactttttcctcagcaatcaggtaaaatggaaattccgtctattacctttgaaggagttatagctcagcaagtggcttcggacgatccttttgatgctttctttaatggtggaagtaactatgtggaagtaaagaaaaacattgttactcctaagctgaccatcaatgtgaaagcattgcccgatggcaaaccggctaatttctctggaggagtaggagaatttactatcagttcgtctatcagtacaaacgaactgaaaacaaatgatgctgtaaccattaagttagtcatttccggtacaggtaatttgaaattggtcaatactccggaaatagcttttccaaaggattttgaagtatacgacccaaagattgacaataaatttacattaactcgtgaaggtttgtcaggcaataaggtgatagaatatctagcaattccaagacatgccggcaatttcactattccgcctgtcgaattttcctattttgacttaaaaagcaatagttataaaacaataaaaacagaagcttatagcctagaagtggaaaaaggtgcaggaaatgcagatcaaattattgcagactttaccaacaaggaagatttgaaagtattgggacaagacatccgttacatcaaaatgggggaaactagtttgactcgtaagggagatttcttctttggctcaacaacatattatttatggtatatcattccattggttctcttcattgttttcgtaattgtctatcgtaaaaaagctatcgaaaatgcaaatgtagcaaaagttcgcactaaaaaagcgaataaagtggctgccaaacgcatgaaaaatgcaggcaaattattaactgaaaacaaacaagaagcattctatgatgaggtgttgaaagcactttggggatacatcagtgataagttgaatatcccggtttctcaattgtctaaagataatatcgaggacgaattgacccaatatggagtcgctcccgaactgataaaagacttcatcggaacattaaatgaatgtgagtttgcccgttatgctccgggtaaccaaaatgaagctatggataaagtatattcttcggctgttgaggtcatcagcaaaatggagagtagtataaaacactaaatcaaaggagattataacaatgacaaaaatatatttcattttgatattcctgataagttttgtcacagtttacgcacagaatgaatcagactctgcacaggttgccgcccaaacagaaatgccacaaaatgctgctgtacaaactttcccaacaaagacagaagctgatagtgcatatataagaaatgattttgcagcttctgtagagatatatgagaatatattaagaaacgagggggaatcttccgatatttattataatttaggtaacagctattataaaatgaataacattgccaaagctgtcctcaattacgaacgtgctttgttgctaaacccaggaaatagtgatattcgtttcaacctagaactggctagaagcaaaactgtagacaaggtaacccctcctagtgagatgtttttcattacttggactcaatcacttattaatacaatgagtgaaaaggcgtgggcacatacaggcattatcatgtttattctgatgatattggcactgtctttatttattttcggaaaacgagtagtcttgaagaaaataggatttatttcagcaatctttttcttcctagtgactattttagcaaatatatttgcctcagaacaaaaatctgaattaattaaccatgataacgctattataatggctcctagcgttacagttaaaagtactcctaaccaaagtggaacagacttatttattcttcatgaaggtaggaaagtaataattaaagataatacgatgaaggaatggaaagaaattaaactggaagacggtaatgtaggatgggtgcctaccaatgttattgaaatcatttaaaacataatcaatggatatacaacagtacatagcagcagataaagaattactactgaatttgaacggaagccaatccttattttgggacggattcatgtgggtagctaccagtacaattgtatgggtacctgtagctgctatgctgttatatatcataattaaaaataataaaattcaagaagcattattgactattattatgattgccttagtcataactttagcagatcaaatagcttctggtttgtgcaaaccgtttttcgcacgttttcgcccaacacaagatcccaatattatgtatatggttgatattgtaaacgaatataggggaggacaatttggcttcatatccagtcatgctgccaacacatttgctatttctgtctttttatctttactaattaaaaggaaatctcttacttttatgcttcttttttgggccgtgctcaattcctattctagaatctacttaggagtgcattatccgggagacattctttttggcactatagaaggttgtttcataggctatctgatttatctcctttataaatttattcaaaaaaaaatcttttataaaccacgttgcatttctaatcaatacactgctagcggttatttgattagcgatattaatttattttacataattctcatttctacttatttcttcattattatagcaggtatgattgtaactcatacacttaatctataattggcaaattaaccattataaatttacatatagtcaaaaatagcacaaaaatatttgttttatgcatttttttgattaagtttataccatgatttaagaactcacttttataactaaatttaatacatcatgagaacaataacatttaatgaactgcgcagaatcaaagattcattacccagtggaagtatgcacagaatcgcagatgaactcaatatgaccgtagaaactgtacgtaacttttttggtggacacaatttcaagaatggtaaaagtgttggaattcatttggaaccaggaccagatgggggactagtaatgttagacgatacaacagttcttgaaaaagcccttcaaatattgagagaaactgaagaaaaaataacgcaagaagtgtaatataaaatcccggttgaattgcaacattcaattgggattttttgtttaacctgaaaatcacttaaaatatagaattatggaagataaattggtaaccttagcaatcctcacttacgctaaagctcagattttaaagaatgtgcttgagaatgagggaattgaagcgtacattcacaatgtgaatcttattcaacctgttatatcttctggggtaagactaagaattaaagaaagcgatctgccccatgctttgcaaattatagaaagttctgcatggctttcagaagatataatcaaagggaaggagagtagctcggaaaaaaacaaagaaaaaagaaaagtacttatcccggtagacttttcaaactattcccttaaagcctgccaatttggtttctcttttgctaatgctattaattcagaagttgtgcttttacatgcttatttcagtcctatttatgtgcctacaattccttatggaactgataatttcaattttcagatcgaaagagaagaatctgtaaaaagtatgatagaaacagtgcacaacgagttgaacaaactttccgatacaattaaaaagaaagttgagtcaggagagtttcccaatataaaatatacttgtattttgcgtgatggcattcccgaagaagaaatcttacgatatgctaaagaatataatcctcagataattataatgggaacaagaggaagaagtcaaaaagatatagacttgattggcagcgttacggccgaagtcatagaaagaagccaatcctttgtatatgctattccagaacatacaccattaaaaacattcaatgacataaaaaaagtagcttttgtgaccaattttgaccaaagggatctaatagcttttgactccttgataaatgtttttaaatcgtttcattttgccgtttccttcgttcatttaagtacagataatgatgcatggcatgaaataaaactagcaggtattaaagattattttcaaaaacaatactcaaaattggaactacattataatgtagtgaaagaagataacatactgagcaatttggacaaatatgtaaaagaagaaaatatagacgtaatttgcatcacaaactataaacgaaacatatttgctagattgtttaatcctagcatagcaagaaaaatgatatttcatgctaatacacctatattagtaataaaataaagaatcaagaagggtagcacaagcaaatcgcaatattttgttactctttaacatattaatatctacccaataaaaaagagatcaatataaattaaacataatattgattatatatcaaaaatggttctcgtaaacggatgtaatgggtacaagacttaaagatacataaaactttaggtaataacaaaacccgggcttgggaaagtcttttggcataaaaagagaggttgtgccagaattttaacacaacctctttattattttaaaatcagtgtttttattaatatcctaattctttttccaaagaatcatattcagctctatttaacttccaataaatattcagcaaataattcccccacaaagccttattgtcaggctttaattcttttgccttctcatagtatggtttagctttctcatacaactctttaatcttactttcgttttcattgtatttgggatcatcaatagctagcttcgcattttcctcaacaataatctgagctgggaaaaaataacagtcaccaatctttgaatatgcttcagcaactaaatctccgttatttgaaataattttattaaatgtagcaattgcatcatcatactgctttttctcatataataagataccttttacataaagatagtacggagtttcactcgtagcaagcaatttattaatttgaaccagaccctcatcaaccatacctttttgaatgtaataatccataatattaccaacaaagtattcttgcttagggaacaattcagtaccttctttgattacttcaagccattttgcagaatcaccaccttctttctgaccatatgtttcagccaagcacattaatgctctataaccttcttctttatgattcttacctatattaccatatttgatgacagcctgattatctttcagcatattagcagctaaagttgcatagcaagcatataatgcattcaaagtatcagtcttcaactcatcatcatcagcaaacataggttcgtttactacatcaacaaataacccaaaatactttaaagcatcagcataatctcctttattgtaagcatcaccaccaccattaaccaggtttaaacgcaaagtcttcaaagcatctgcattcttctttctgaatttgggtttctttaactcgccactttgaactttagcctgctctatttcatcgcacttcaagtagaagtcatacatcttagctaagctgttataaagcttagttgtatctgcttggcctccaggtaaataaagtttcatgttttcttcatcataaattgctttctgaaaatctcctgctaatttccatgtttccggatcattagcagtttcaggattagttaaagccggttcgatagcttttgcagcttcttcaggtttgcttttcaaggatttagcctccttaacaacacttacttgtgcagacacaaagcaagctgttaacaataaagccactgtaaataatacttttctcatgattttgtggatttaataatacaatttattttattcttcactatttgcttcggcaattaaatctggattagtgatactaccaccctctccttcagttatattttcaaaatctgcatttgaattttcatctgtaatctcctcttcttcagatgtcaccttacatacagaacctatttggtcattacgtttctccaaatttatcaatcgtacaccttgcgttgcacgtcccataatgcggacctcagcgactttcaaacgaattgttataccagatttattaataatcatcaagtcattcccatctgtaacagacttgatagccaccaatttacctgttttatctgtaatattcaacgtttttacacccttaccgccacgattggttttacgataatcttcgatatcagaacgtttaccgtatccttgttcagaaactaccatgattgattcagcttcaggatcttttatacaaatcataccgataacttcatcgccaccatcttcatccaaagtcataccacgcactcctgtagccgtacgtcccataacacgaaccgcactttcgtggaagcgaattgcacgaccattacggttagcaataatgatttcattatcaccgttagtcatacgaacttcgatcactttatcatcctcacgaatagttatcgcattaacaccattctggcgaggccgtgagtattgttccaacaaagtctttttaatgacgccattctttgtacagaacagcacataatgactattaataaactcggtatcattaaggtttttcacacgtaaatatgctgtaaccacatcatcggaatcaatattcagcaaattctgaatagcgcgtcctttggcatttttagttccttcgggaatttcgtaaactttcaaccaatagcacttacctttctgagtgaagaacatcatagtattgtgcattgtagccggataaatatgctctacaaagtcttcatcacgggtttcacttccttttgatcctaccccacctctattttgggcacggaattctgataaaggagtacgcttgatatatcccatatgggatatcgtgataaccatctgatcatcagcataaaaatcttctggattaaattcttctgaagaataaactatttcagaccgacgggcatccccgtatttctcttttacttctatcaactcatctttgattacttttttacaaagttcatcatttgaaagaatttcttcataataagcaatctgtttcatcacttcttcatattctgcgtgaagctgatcttgcatcagacctgttaattggcgcaaacgcatttctacaatagcacgtgcctgaatttcactcagattaaaacgttctattaaccctgctatagcatcattaggggtttttgcagcacgaataatacggataacttcatcaatattatcagaagctataatcaacccttcaagaatatgagcacgctcctgtgccttccgtaaatcatactgagtacgacgaattaccacatcatgacgatgttctacaaaatatctgattaaatctttcagattcaacattttggggcgaccatggaccaaagcgatattatttacgccaaatgaagtttgcaaagctgtcattttgaacaatttgttcagcaccacactagcatttgcatcacgtttaacatcaataacgatgcgcataccttcacggtcggattcatcatttacatacgaaataccatcaatcttcttgtcattaactaaagatgcgatattttcaatcaattccttcttatttacattataaggaatttcattaactatgatcttatcatgtgtagtatgagtttctatctcagccttagcacgcatcaccactctaccacgtccggtttcgtaagcatcacgtaccccgcttataccatatatatatccacctgtagggaaatccggtgcttttacatattgcataagtccttcaatatcaatatcattattgtcaatgtaagcaatacatgcatcgattacttcagaaagattatgagtaggcatattggttgccatacctactgcaataccggatgctccatttaccaacaagttaggaatccgtgtcggcatgacagtaggttcctgcaacgtgtcatcaaaattattctgaaaatcaacagtttccttataaagatcctgcatcatctcttcacctattttctttaatcttgcttccgtataacgcatggcagcagggctgtcaccatcaacagagccgaagttaccttgaccatctaccaacggatatctcatagcccagtcctgagccatcctgaccaaagctccatacacggaaaagtcaccatgcgggtgatatttacccaaaacttcacctacaattcttgctgatttcttataagctttatcggaggtattacccagctcaatcataccatataagatacgtctatgaaccggtttaaagccgtcgcgaacatccgggagagcgcgcgcaacaattactgacattgagtaatcaatgtacgacgacttcatttcctcttcgatgttaatctttataattctgtcttgttctagcatttaaacaaatattaattatacatctttttggtttaccaaaaaccacgctaaagtactacttttatacgacatacgaaacaaaacccataaaaaagttaagtccattaaatgtttttacttatataagtaaaaagtatccctataccttattctatagtatatagtgattatcactcccacttctcatttactttgtgaatagtttgctataacccttatttttgtttaatccatttagtctgtcaaagcttggcatacattttgttatgctaatataaataagaaaacaatggtatgcattgttattatgtgtatctttgcacactgggaaataaacactatactttaggaggacgataaatttatgaacaatcaatttacacaaagagtgtccgatatcatcatgtatagcaaggaagaagccaacaggctgcggaatagctatattggtcccgaacacttgttgttgggactgatacgtgaaggtgaaggaaaagctatcgagatcttatttaatttacaaataaacttacaggacataaaaaatcagttggagaccattgtgaaaaacaatgtggaaaatgacaccacctatgacgagaatattagctttaatgacaaagcatccaaagtgttaaagttatgtattctggaagctaagttattgagaaacattgcagctgactccgaacatattttattagcaattatgaaggtcaaggataatacagctttccacgtcttggaaagcaatggcgtaacatacgaaaaaattaaactcactttacagccagatccccatgcaggtctggggttcagtgaggacgaggatgaagacgaagatatacgtcagaatccaagtagcaataaatcaaatgcagcacaacaacaggcacgtccggcacaaaaaaagccagctaatgacactcctgtactcgacaattttggcacagatatgacaagagctgccgaagaaggaaaactggatcctgtagttggccgggtgaaggaaatagagcgactggcacaaatattgagccgccgcaagaagaacaaccctattttgattggcgaaccgggagtcggcaaatctgccattgttgagggacttgcattacggattgtggaaaagaaagtatcacgtattttatttgataaacgcgtgatagctcttgatatgactgccgttgtcgcaggcactaaatatcgtggacaattcgaggaacgtattcgttccattttgaacgagttgaagaagaatcctaacatcattcttttcatcgatgaaatccacactattgtgggagcaggttctgcagcaggctcaatggatgcagccaatatgttgaaacctgcattggccagaggtgagattcaatgcatcggagcgacgacattggacgaataccgccaaaatattgaaaaagacggtgcattggaacgccggttccaaaaggttattgtagaaccaacaactgcagaagaaacacttcagattttgaaaaatatcaaagataaatacgaggatcatcataatgtgaactatacagatgcggcccttgaagcctgtgtaaaactgacagaccaatatatcacagaccgtaacttccctgataaagcgatagatgctttagatgaagccggttcgcgcgtacatcttactaatatcactgctcccaaagaaattgaagaacaggaaaaactgattgatgagatgaaatctcttaaaaatgaagctgtcaggttacaaaatttcgaactagccgccagttatcgtgacaaagagaaagaatatacgaaccagcttgatactctgaaggaagaatgggaaaaaagcctgaaggaaaatcgggaaacggtagatgacgaacaaatagccgaagtcgtttccatgatgtcaggcgtacctgtgcaaagaatggcacaggctgaaggaatgaaattattaggaatgaaagacgatctgctttctaaagttatcggtcaagacaaagcaatcgccacactggtaaaagctattcaaagaagccgtgtaggtctgaaagatcctaataaaccgattggtacattcatgtttctaggtccgacaggtgtcggcaagactcatctggctaaggagttagcgaaactaatgttcggttcggcagatgcacttatccgcattgacatgagtgaatatatggaaaaattcaccgtatcccgtctggtaggagcacctcctggatatgtaggttatgaagaaggcggacagctgacggagaaagtaagacgtaaaccctactccatcgttttattggatgaaattgaaaaagcgcatcccgatgtattcaacatactgttgcaagtgatggatgaaggtcggttgactgacagttatggcagaactgtagactttaaaaataccatagttatcatgacatccaatattggaacccgccaacttaaagaattcggaaaaggaatcggatttgccgcccaaatccgtacagatgacaaagaatactcgcgcagcgtgattacaaaagctttgaataagtcttttgcgcccgaattcatcaatcgtctggacgaaataataactttcgaccaactcgacctgaatgcactgactcggattatcgatattgaacttaagggtctttacagtcgtgtggaacacattggttataagcttgttatcgacgaagatgccaaaaagtttgtagccaccaaaggttacgatgtacagttcggagcacgcccattaaaacgtgccatccaaaacaatttggaggatggaatctccgagctgatacttggatcagaaatggcggctggtgacacgatcaaggtaagctatgacaaagaaaaagacatcattgtcatgactgtggaaaagtaaagagtccaaagttcttcaaaaaataacagacaaaatgtcagatatcattgtatctggcattttttttgcccatcatccaacaaaaagacgattcaaacgtatatataacataataacttaaaaccataaatagtatgcaaaaaggaaatattggggtaaccactgagaacattttccccatcatcaaaaagttcttatacagtgatcatgaaatattcctccgtgaattagtttctaatgcagtagatgccacacagaaactgaaaacccttgcatctaaaggtgaattcaaaggagagatgggagatcttactattaaagtaagtttaggaaaagataccatcaccatttccgaccggggtatcggacttacagccgaagagatcgacaaatatatcaatcagatagctttttcaggcgctaacgacttccttgaaaaatataaagatgatgccaatgccatcatcggacactttggtctgggattctattctgccttcatggtagccaaaaaagtggaaatcatcacaaaatcccaccaagaaggagcacaagctgtgaaatggacttgcgacggaagccctgagtttactatcgaaaatgttgaaaaagaaagccgcggatcggatattatcctttatatagatgatgactgcaaagaatttctggaagaaacacgtatttcttcattgctgactaaatattgccgcttccttcctatccccattgcattcggcaaaaagaaagaatggaaagatggaaagcaggttgaaacaaatgaagacaatgtaatcaacgaaacctatcctttatggacacgcaaaccggtagaactgaaagacgaagattataagaaattctatcgggaattatatcccatggcagacgaacctttgttctggatccatctgaatgtggattatccgttcaatctgacaggtattctgtactttccgaaagtaaagagcaacattgaattacaaaaaaacaaaatccaactttactgtaaccaggtctatgtcaccgactcggtagaaggtattgttccagacttcctgaccctgttacacggagtgattgactcaccagacatcccgttgaacgtatcccgttcttacttgcagagcgattccaacgtgaagaaaatctccacttatatttctaagaaagtatcagaccgcctgcaagccatttttaagaatgaccgcaaagaattcgaggagaaatgggatgatttgaaaattttcatcaactacggcatgttaacccaagaagagttctacgaaaaggctaataaatttgctctgctgaaagacacagatgacaaatattatacttatgaagaataccaaagcttgatcaaagataatcaaacagataaggacggcaacttgatttatctgtatgctacccatgcagacgaacaatacagctacattgatgcggccaagaacaaaggctacaacgtattgttaatggatggtcagctggatgtagctatggtaagtatgctcgagcaaaaatttgaaaagagccgcttcacccgtgtggacagtgatgtaattgaccgcctgattgctaaagaagagcgcaaagatgccagtctggaagccggccaacgcgatattctatcttccatattccgcagtcagttgccacagatgaagaaagtggagttcaatgtagaaacacaatctttaggcgagacaggaactcctatcatgattacccaaagcgaatatatgcgccgtatgaaagaaatggccaatatccaggcaggtatgagtttttatggagaaatgccggatatgtttaacttggttctgaatgtcgaccacaaactggtgaaacaagttttgaatgatgcggacaactcttgtaaagctgctcttgaacctatcgaaactgaaatgaccagtctgaataaacgtcacgacgaacttcacaaagcacaggaaggtaaaaaagccgatgaaatacctcaagcagaaaaagatgaattaagtgatgttgagaaaaagttggccgatgaaaagaccaagaaagaagctgttttaggtgaatacgcaggtggtaacaaagtaatccgccaattgattgaccttgctctgttacaaaataatatgttgaaaggcgaagctttgacaaactttgtaaaacgcagtatcgaactgatttaacaaatctatcacattttgctatcaaaagcgtcgggaagttcatttccggcgcttttttattctaaaaaacgattggaaacgaagatttctttctatatttggagcaacacatacaaagattcgacatccatgaaacattatctatatatactttttcttctctttttactgcttcctcccatccatgcacagaaagtgggactggtactgagcggaggaggtgccaaaggcctaacccatatcggcattatccgcgcattagaagaaaacggtatccccatagattatattgcaggcacatccatgggagccattgtcggttcactttatgctatgggctattctcccgatgaaatggaggctttactcaaatccgatgacttcaaacgctggtattcaggtaatgtggaagagaaatacatctattatttcaagaaaaatcctccaacacccgaatttatcaacatccgtatctccctgaaagactcgctgaagaatgtcaaacctcagtttttgcctaccagcattgtagatcccattcagatgaatattgtatttctgcaattattcggtcaggcaacagctgcaagcaaggccaattttgacagcctgtatattcccttccgctgtatagcttcggatgtgtacaacaaaagaccactgatattgaaaaaaggagatctgggagatgccgtacgtgcctccatgagttttcctgccatgttcaagcctatcgaaatagactcgatactggcatacgacggtggcatttacaataattttccagtgaatgtaatgcgtgacaccttccatccggatatcattataggaagtgccgtatccgccaatccgggcaaacccaaggaaggtgacattatggggcaactggaaaatatgattatgcaaaagacagattactctttacccgattccctcggcatcctcatgacttttaaatatgatgatgtcaatttaatggacttccagcgctttgacgagttgcatgacattggttataaacgtgccatagaaatgatggactccataaaaagccgaattcatcgaagaatcacccccgaacaagtgaaagttaaacgactggcctataagagcaatttaccggatttccgtttcaaaagagtaaatataactggtgccaacgaacgacaaaagcaatatatacaaaaagagttccatgaaaacgacttcgatgttttcactatggaggatatcaaacgagcatatttccgtttgttgtccgataatattatatccgaaatcattcctcatgccgtttataatgagaaagaccaaacctacgacttgaacctccaagtcaaaatggaggccaatctctccgttcgtgtcggtggaaacgtgtcttccagtggctccaatcaagtctattttggtgcttcctatcaaaacttgaactattattcaaaagaatttaattttgacggacagttaggtcgggtctacaataatgtgcaacttgcagcacgaattgattttccaaccaagctgcctacatcttataaattcatagcctcgatctccaccttcgattatttcaaagaagccaaattcttttccaataaagacaatccggctttcaacaagaaaagagaagagtttgtaaaattgaaggtgtcattaccgtttctaagccgtaagaaagctgaattcggtgtaggtatagcccgtatggaagacaggtacttccaaaccaatatcatcgacttcagcgagacaaaacataataaaagcacttattctatcttcggaggctctatcgtattggaaggaagcaccttgaatgcccgccagtttgccacacaaggaagtcgtgaaaaaatggctgcacaaattttcaccggcacagaacatttcagatcaggtgcatccaaagtgactaaagacacaccggaaccttataaaaaggtacaatcctggcttcaagtttcatatcagaacgaaacataccataaggtaagtcctaagtttaccttgggagcgtatctagaggcgtattactcatcccgaaatttctccaataattatacggctacattaatgcaggcaggagaattcactccgacagcccatagcaaagtaacctataatgaggctttccgtgctaatcaatatgccggagtcggcgccatacccatctaccagttaagcgagtcttttcaattacgcggagaattttatggatttgtacccatctttcctatcaagaaagatgaatatggacaagcatattacgggaaagctttcacaaaattcgaatatcttggagaaatctcattagtttttcaattatcgttcggttctatcagtgcttatgtaaaccactatagttcaccgtctaacgattggaatgtaggtttaacactgggctggcagttgtttaactcccgtttcatcgaataatttttagaaaaaagttttagtaaaacgcttgcattttcaaaaaaagtccgtatctttgcacccgttaaaacaaaagaacaataaataatggccgcgtagctcaactgaatagagtagctgactacggatcagccggttacaggtttgaatcctgtcgcggtcactaccaaaagaagttcgattagttttgcaatggccgcgtagctcaactgaatagagtagctgactacggatcagccggttacaggtttgaatcctgtcgcggtcactaccaaaagaagttcgattagttttgcaatggccgcgtagctcaactgaatagagtagctgactacggatcagccggttacaggtttgaatcctgtcgcggtcactaccaaaagaagttcgattagttttgcaatggccgcgtagctcaactgaatagagtagctgactacggatcagccggttacaggtttgaatcctgtcgcggtcactactaaaaatattaaacaatggtcgcgtagctcaactgaatagagtagctgactacggatcagccggttacaggtttgaatcctgtcgcgatcacaaagaaggccatcttttctgatggtcttttcttgcattttctctctttttttaaatttaaatggctcagttgtaattcttgggggaaaatcccctgttaagcacctccgcgcttctacaggtctaccatttttccgttcttatatctttgcagcatataaaaaagaagcattatggtttagaagaacttgggaacgcttcttggaagcattgaaattatccccaatcacgcctacaccttctccaacgaaacaatgacgaccaacacaacttctcacacacctgaaaagaacagttcatctttaaacaagcgcttgttcttttttaaaaaacaaggcgtttcaaaggttactaacatacagaccgacaggttagtaacgtgtcgggtaacacgttactaatgtatcaggtgaaagattagtaatgttacgcgtgaaagatatagaatcttacaggtataatatatcaaagaacgaacagacaggcataaaaaaaagactggtgtttttaatgacgaaacaccagtcttatctaattaaaaaaattcctttatcagcatttaattttcaattcatccaaaatagcacgcatcttttcaaatgttgtgatacgagtcggtacaagcggcaaacgtaatttattttcaatcagccccattacattcaacatagccttcaccccggcaggattaccatctacgaacaacaggctgaataattccgtaaacctatgatgaatagtcaatgcatttgcaaaatcaccctgtaatgccaaacgagtcatacgactgaattcacgcggaaatgcattaccgataaccgagataacccctacagcacccaaagtaatcaaaggaaatgtaataccatcatcacccgaaatcacatcaaaattagccggtttattcttgatgatatcatccatctgagtaatattacccgatgcctccttgatagcgataatattcttgaaatcgcgtgccagacgcaaagtggtctcagcagtcatgttcacaccggtacgtcccggtacattataaagaaccacaggaagatccgtcgcttcagcaatcgctttatagtgttggtaaataccttcctgggaaggtttgttataataaggtacagcaacaagtacggcatcaactcctgtcatatcatcatttttcagcgtttccacaacagcacgggtacagttgctgctaactcccagcagaatagggatacgtccattcactctttcgattatcaaacgttttatcttgtctttttcttctttagtcaaagtcggggtttcagccgtggttcccaacacgcacaaaaaatctgttccattttgaagctggtaatcaaccagacgaagtaacgcatcataatcaacgctgtcatcttccttgaaaggagtaatcaacgctactcccatgccttttaatcttgtctgtatcataaatgaattataaattcttatttaatagcctacaaaagtacgaatattttctcttttagcgataaaaatcacactatttttagtttatactcgctaaaaagtcactctatcatttgcagaaactcctcttcgctcacaatggtcacacccagtttctgcgctttctccagtttactgggccccatattgtcacccgccagaacaaagctggtcttggacgaaatacttcccacattcttaccaccatgcttttcaattaactccttatattcgtcacgcgaatgatgggcgaaaaccccactaatcacaacagatttccctgccaatttgtcagtgtgtcccgaagtatcctcctcatcagcttccaatctcacacccgccacacgaagacgctctataatgtcacgattcttcggattagcaaagtacaacaagatactctgtgctattttttctccgatttcatcgacatgaatcaaatcatctaaactcgcgtctgccaaagcatccatcgacttaaaggatttcgccaccttcttcgccacagtttcacccacaaaacggatacccaatgcaaagagcaccctttcaaacggcacttctttggactgctctataccttttattatattctcggcggatttttctcccatacgttccaggttgatgatatccgatgtttttaaagtatacagatcggcaacatcacgtatcaatccttcctggtaaaactgatctaccgtttccggaccgagtccatcaatatccatagccctacggctgataaaatgttctatttttcccttgatctgtggggggcaagcggcatcattggtacaataataagcagcttcaccttcatagcgcaccaatttactgccacactcggggcaataagtaataaactttactttatcacctatcataatacgggcgttcttgtccacacctacaatttttggaataatctcgccccctttttctacataaaccatatcgccgatatgcaaatccagcccttctatgatgtctgcattatggagcgaagcacgctttaccacggttccggatagctgtacgggatccagattggccaccggagtcacagcacctgttcttcccacttgataggtcaccttgttcaaacgggtaagtgcctgttcggcctgaaacttgtatgcaatggcccatcggggtgattttgccgtaaaacccaaattacgctgctgtcgcaaagaattcactttcagtactattccgtccgtagctacaggcagattcttacgctccacatcccagtatttgatgaaatcaaatacttcctgcaatgttttgcatttgcgagtaagatcagaaattttaaatccccatttctccgcttctttcaaattttcataatgaccgtcgcacggcaaattatctccaagcaaataataaaggtatgcatccagcttgcgggatgccacaatggcagaattctgcaacttcaatgttcccgaagctgcgttgcggggattagcgaacaacggttcttcgcgggcttctcgttctttgttcaattcctcaaacaccacccaaggcatcaaaatctccccacgaatttcaaatgcttcaggatacccctttccatgcaacaccaaagggatactgcggatggtcttcacattgcctgtcacatcatctccttgcacgccatcaccacgcgtcacagcacgcaccaatttcccgttctcgtaagtcagcgaaatagaagtaccatcgtatttcatttcacaacaaatctcaaaatcttcgttcaaggacttctttaccctgtcataaaactcggttacttccgtttccgaataggtgttagtcaatgaaagcatgggatatttatgtaccacctgcatgaagtttttgtttatatcacttcccacacgcatactgggcgagttctcatctctatgttccggatgtttttcttccagatcctgaagttcacgcatcagcttgtcaaactcctggtctgtaatctcaggcgcattcaatacataataattatagttatgtcgatgaagctcctcgcgcaattggtctattctttctatttctgtcatatatataaaggtagttttcccgcaaaaatagctattttttgaatgaaaaacaccttccggcaaagaggaatttgctacttttgcaaaaaataaccgaatatgagaatagacatcattaccgttttacccgagatgctggaaagcttcttcaactgctctatcatgagccgtgcgcagaaaaaaggaattgcagaaatacatatacataatttacgcgattatgcatacgaccgttatcgcaaagtagatgattatcccttcggtggatttgccggtatggtgatgaagattgaaccaatagaccgatgcatctcagctttgaaagcagaacgcgagtacgatgaaattatatttacatctccagatggagaacagtttaaccagccgatggccaactcactttcactcgcaaagaatttaattattctatgtggtcattttaagggtatagactatagaatacgtgaacatttcattacgaaagaaatcagtatcggtgactatgttttgacaggtggggagttggctgccgccgttatcgccgatgccgtagttcgtattattcccggggtcatttctgacgaacaatcggcattgtccgattcttttcaagataatctgttagcagctcctgtatatacccgtcctgcagaatacaaaggatggcaagttcccgatgtgttgttatccggacacgaggcaaagattaaagaatgggagcttcagcagtcattagaaagaacacagcggctaagacccgatttgctaaaataaaaaatatatataaaaaataaagagataaaagccttatgatgaacatggcttttacctctttgcttttgtttatatcatacctgaaaagatgttctctctttaatataacctaagtccatcttccttttccttatatattgataaagctttttcaagtgtttttctactccattttttcaaaaacaagccatttcatcgaaaaaaaataattgaagttatcattttatacccatgcaataagttgtaacaacaaccatttttatactcgttctatctagagaaggttataaaaaaggccctgcaagaaatgcttcaatttattcatctacactctcgcagggctataatttaaaagataaaattttcagatttctaaagcgcctattatatcttttacagatgtatatccatgacgttccaaatagtcatttattccttctgaaactttgacagtaatagctgggtctatgaagttggcagtacctatctgtattgcggtggcacctgccaacataaactccacagcatccttccagcccatgataccccctagtccaatgacaggaatatttactgctttagcgacttgccataccatacgcaatgcgattggtttcacagctgcaccactcatgccgccggtaatagtggaaagtacaggccgacgcttttcagcatcgacagccatccccagcagggtattgatcagagatacactgtccgcaccggaaacctcggccgcacgtgctatttctgtgatgtctgtcacattgggagataattttacgatcagcgtctttttatacacattacgtacagcttttacaacctcggaacacccgcatgcggaaaccccgaaggccataccgccctgctttacattagggcatgagatattcaattctatagcgggaatattatccagatcattgatgatctcggcagtcttcacataatcctctacagcagatccggatacattaacgatcatattagtatggatatcccttatctgtggatagatatgttcaacaaaataatccacccctttattctgtaaccctaccgcattaagcatccccataggggtctctgccatacgtgggtaaggattaccctcacgatgatgaagggtagtcccttttacaatgatgccaccaattttttcgaggtctacaaagtcctcaaattcttttccgtatccaaaggtacccgatgctgtcataaccgggttacaaagctttaaatcgccgatatttacacttaaatctgccataatagtttctttatattaaatacaggaccctctttacaaacacacaaatgcccttcgtccgtgttctccacacagcataagcatgcaccgacaccacaagccatcctattttccagtgaaacctcacattctattccatgaactttggcgtatttagctaccgaaatcatcatgggttttggaccacaggtgtatatcatatcaaaccgatctgtatgcaagatgctatgctgtgtcacatagcctttctcgcccatacttccatcttcagttgttgtatacaccttacctaatttctcaaaatactccagctgcaacagatctttggatgaacgtgcgcctagcaggaaagcaggcgtacatcccattttcactaactcagcaccgagcatcaacatcggggcggtacccacaccaccgccaaccagtagcggctttacctttgtcacattccggggcattgtaaatccattgccgagaggcatcaccacattaacaatatctccttgtttcacagtggctagtttgcgagtgccatcgccaactaattgcaccaggaaccaaacttcattggttgttttatccacataattaatagaaataggacggcggagaaaagttgtattggaaccgtcaatacgtatctcagcaaactgccccggcagcatctcgggcaatgggttggcatgagtcaattttatcagaacataattggcatgcaattttatgttctgtgtaaccacaaggtctaaaatatattttttcatgaaataaaattgggtaaattcattttctatgcaaagatacacgaatttacccaaatcttattctgctaaccggcattttagtggattcccaccctaattttcaggcttgaacgtttcataagtcccattatcaaagaatattcttatttcagtgatttttttggcaggtatttccacatacttaatttcctcacgcacaatctctttaggagaataaagtggtgttttaacctcattttccttgcgatattccggagaaactggacgttcgggcgtaaataatgaattctcatcaaacaaagaaggcgtataatgaatgttattgtctgaatcaacatccgtttccatttgtccttcaccatagagtaaccagtctaaactgatatagtcacacgctttgtgtattttcatgacgacttccaagctaggattattcctaccactaagaatatgggaaagagaggaaggtgaaattccaatcttctctgcaaattgagctgcagtcatatcttctttctggattatttgagcgattctttccttcatttacaaaagtataaggcaaaatttacagatacaaaagtaattaatataattcataaatgcaaatttacaatatggaaatgtatatcttacaaaagtaaagtatgagtatattattggaaataaattaagatttacacacgtaaaccgctcctaaaaatactataattatcactttatgcatgactatataaaatactgattatctataatatatacacaacaaaaatgatatatttacaaataaatatgattatataagcaaataaaatgcatacaagttattaaccactttatcgacaagatataaaacactggtttcaagcatattatcgtaataaaataagagataaataattattcatatacatttatatatgtaatcttcactcttaactactaccttgtttatatttgtattatttacattgttaaacctgcaaagcttataatatctcctatattaggaaagtttacagatgtaagattacaaaattaaattataattatttctaaaagtgaattttctctgttttacgctccagcttgatcctatgaatattttgttttcctattttacaagtatcaatgtatttttcatggtaaagacaagaactccccatccaagttttagcccattttcgctttatgggattcatagataatgagaatcatagaatgcacgataagaggacaaagtatggattcaaaatttaaactaacgtatgaatttacaaaaaataaattgtcgctgtttacttgcttcatctgcattctttccattcttcttattcattttactccgaaaaggctaaatactgccattattcatgtacaaacagacattccctttaaaatacgcgattctaagaaggcgaaaaatggtctatcaatctaggaataagcaagttaatactatttttctcatcatccatctctcatcatctagaaaaatagagaacaaaaacataactgtagcattaaatgaggtaataataaaagtatgaatgtaaaatattattctcaattgagtcatcaacaggatttctgctaagagaaaggataaaaagaatcccgacacttaaaaaaacaaaagcatcgggatagcggaatcttgtttgacctcgttagttaatgaagaattttgtatacaagttctcgcagcaaatctccatcctccaaagatggattacccactccttttgattttgcatcacagtaacgaatctcaccaataatttgcatcacctttactccgctatattttctcatagcagccatatagtctttagattgccatggtgatttaagccccagctgattggctataccctgctctgacttatcaggagcataatatgcaagcatcaaattagagaagaaattgaataacacagacaaggtcatttgcaaaggatttgttttggggttctcctcaaaatattttattatctgattagccttgaaaacatcctttgccaccaaagcattcctaagttcaaaattattataatccttacttatgccaatgttacgttctatttgttcaggagtaatccgcttttgctctcttggaagcgtgataattaatttttccaactctccggccatacggcttaaatctgctccaacaaattccgccatcatttctgaagccttaggctctatttctactgaacgacgtttcaagtaagaagatataaagccaggaagctgagcatccttaatctttttcgattcgaaaaggacacctactttctctatttcagctgccaatttttttcttctatccaatgtaccatgtttatggcataacaccagaattgtagaatccaaaggtttctggagataataagcaagctcttcaatattctttatattctgagcttcttttactattacaacttgatatttggacatcatgggataacgcttggctgcattgataacagtcgcgatatctgtatcagccccatagacaatagtctgattgaattctttttcattttcatttaacaccgtttgtgctatatactcagatatccgatctatataataagattcttcacccattagataataaacaggcttatagatacggtttttcagttcacgggctatttcttcgtatgttgtttcttttgccatacacagtaaaattaccagtcaaattttaagtgcttgactgttttcttttcctcaataatcatttgtaatgaagcaataccaatctccacatgctcctctacatattgctgcgttacaatactgtcgcttttctccgtcttcaccccttcaggaatcatcggctggtcggataccagaagtaatgctccagtaggaatatgattgtaaaaaccggtagtaaacagcgtagccgtttccatatccacacacatggcacgcgttttaaggagatactttttaaacccctcatcatgctcccatatacggcggttggtagtatataccgttccggtccaataatcgcgggcatggtcgcggatagccgacgagacggcacgctgcaacataaatgcaggtaacgcaggtacctcaggcggataataatcattggatgttccttctccacgaatagctgcaatgggcagaatcagatctcccaacttatttttcctatctatgcccccacatttacctaaaaacaaacatgctttaggctggatggcccctagcaaatccataatgatagcagcattgggacttcccatgccaaaattaataatagtgattccttccgcatgtgccgaagtcatattggcatcacgtcctagtaccggcacattaaatttgtcggcaaaaagttccacatatttattgaaattggtcagaaggatgtattctccgaaatcattcaagcttctttttgtgtagcggggaagccagtttgctacaatttcctcttttgttttcataatcttttgtatttttgcatcggttattaccgagttacacttatgcaaatttactaaatgttatcattaaacttaccatcctacgaaattaaaatcgcggagcgaaatggaaaaaatgttattttcgatatgctccgcaagagatatgtcgcccttactccggaagaatgggtaagacaacattttgttcattacctgacggattataaaggatatccgaagggattactggccaacgaaatacaactagacttaaacggaacaaaaaaacgttgtgatactgtgctctacaacaaagatctaagtgccaaactgattgtggagtacaaagctccacatatagaaatcacacaaacagtatttgatcagataaccaggtataacatggttctgaaagttgattatctgattgtcagcaacggattgaatcattactgctgccatattgattacaatacaaaaacatatctttttctaccagagattccccactattcagaactgtagatatataaaaaacattctaagcaacatctccttacaagatcttgctcagaatgtgatgaaattctttttccacaaagaaaaagatactgcttcaggcgatattatctcttgacagtttccaagtgctgttcagcaatcacacctgccaattcagggtcaatcatgatacgaccacaatattcacatacgataattttcttacgcatacggatatcaagctgtttctggggcggaatcttgttaaaacaaccaccacatgcatcacgctgaacatacacaattcccaatccatttcgagaatttttacggatacgtttaaacgcctgcaacagacgcggttcgatagttgtttccaatacttttgctttctctctcagcttttcttcttcctgcttggtttcagaaacaatttcttccaattcggatttcttcgcttccaagtccttctttctttcatccaagtcttgattactgtgctctatctcctcgctctttgctttttccgctgcaatatattcctttatgcgtttctcgcaaagctcgatttccaatgactggaattcaatttcctttgtcaacacatcatattcgcgattattacgcacattatcctgctgagctttatatttttcaacagaagtcttagctgtctcaatttcaattttcttagtcgcaatgtttgatttcagttcctcgatatcagctttaattttctcgatacgagtactcaaaccggcgacctcatcttcaaggtcttgaacttcaagaggaagttcccctctcagggtcttaatcttatcgatttcagacaacatggtctgcaactgatacaaagccttcagcttttcttccactgttaattcgctcgggtctttctttgcttctctagccatagttttttcttacaaatatttaataggatttgtatttacccgggttatctggacttccagttccggaaacatctcctgcatgattgaataaaatatttcttttgtatactgctcactctcataatgacctacttcagctaccagaatattattctcgtaattgaaataatcatgatatttcacttcacccgtgataaatacatcagcatcggcacttaccgctttaggcaataaaaatgctccagcaccaccgcataacgctactttctgtatcaaacgaccagataaacgagtatgtcgcagacagcccacttcgaacgtcttcttgatgcgtttcaagaaatccagttcggtttcaggttcttccaattctccgatcacccccgaacctacttgtgtccaagtatttttcaacggataaaaatcaaaaaccggttcttcataaggatgtgttgccaataatgcttttaccgccatagcctttttaaaagccggaagaatcgtttctatacgcacctcggactccttatgcaattcgcctatttctccacagaacggactggctcctttctgcgcacggaaagtcccctcaccttccaaattatagctgcatgaatcataattacctatgcaaccacaaccggcttcaaataaagcttttctcactctatcagcctgtgcatccggcacaaaagttacaagcttcaataaatattcttctttcgggtctaatatgcgtacatttctgagacctatcttttcagctattttataattgacacctccgggtgcattatccatattggtatgtgccgaataaatgacaatatcatttttaatggctttcaaaacacaccgttcaatgtaatcccgaccaataatagatttataacctttaaatataagtggatgatgtgatataatcaggttgtatcccaacatgacagcttcatccacaacagcttcagtaacgtccagacacaacaaagcccctgttgcttccgcttctgtcagtccaacttgcaatccggcattatcaaatccgtcttgcaaaggcagaggcgcgaacctttcaagggcacttactatttccttaattttcattcgttcgcgaaaatttgattgcaaagataatcaatccatttgaatttaaaaagcaaccaagctattttttatactttccccactttatcattttatttttcaaagcataacgttcgtcaacaacacggtctgtcggaaaaaaagtaagatgaatacgccatccgcccgaatgaaacgtaaatttgcgggctaatattcctgtttctatcaaagctagtttatcaatgataaatgctttaatatctacaggaaattcctctccttcatacattatatccgcagtgacaaagaaaccgggagttgataattctgctatatatttccaaatttgctcattcatgtttttctattttattgaaagaaatatataatgtatacaaagcaaggaaagaccctacttccgtttggtatccttatgaactcgtaacaaccggccataactgtcgaatgatttccgtgaagccagaaaaatggtcatcattagtgaaagcatagatgccaccacagttataactacaatcataatctgatatttgatagccacatgtggcgaacttcctcccaatatctgcccaatcatagttcccggcaatgcaacaagccctgttactgccatattggcaatgcccggactgaacgctttaataagagcctgacgcacaaatggagctatcgcctcattacgggtagcgccattccccaacagaaaataataaagttgctgttccctacgcaatccggcatagtaagtatttaatcctatcacattcactcccaacatattccccatgattataccaaaaaccggaataaaatactgggcactgaagatgttatccaactttaatacaaagccaaggaaataaagtccgacaagcaccactgttacaaaaaaaccgatagaaataggaatcatcaaaattccgcgttttaaccgcgtacgcgtcaaagccgtttcagcagccaccccaaccatgatgatcacccacaaaaaattaataaacggattgttccattcaaacagaaaacgaagataagccccaatcaaaaacaactgtataatcatacgtactgtgcctatcagaaccggtttaagcaagcccgtcttgaaacgccataaaaaataaaccggaataagcatcagcagcaatcctactcccaaactgccatagtctatatcaattgttcccatcagtcagattataaagtaaataccttgtcgcatccggcagcaaactgtttgtcatgcgaaacagacaatatagtcattcctttactgcataaggatttaaagaagttaatcacccgtaaacacgattccggatcaagtgccgaagtcggttcgtccactaccagtaaaggtttgtcaagcaaggctgtcactgccaacatgatacgctgacgctgaccacccgacacttcatttacccgtttatcataaagtttctcttccaatcctaatgatacgaaataatccatcagccgctctttgctgaatcccgcctcacgatttgccttcagttcaaaaggcatccgcaccatttcactgacccattccgaaggaagagccaactcctggggaatccatgctattttctttcggatatgatccgccgtcttaggtgccagcagtgtgccgtccacccttattgtcccttcacttaaaggaacaaagcccaaaacagctttcagcaatgaagattttccactgccggaaccaccacaaatgcatacactttctccgtaatgaacttgcaggtcaagtcctctgaaaagagtcagattaccaaaacttatagatatattttctatattaatcatcacattaaaacaaaaagagtcgggagcattcactgctgccgactccacataatgtattaaaaataaaataaatgtgtcgaagtttaatatgctctcgcaaagagaacacggcgagcagatggttttccggttaccatacacttgcccggagtcaggctctcttcatcagcatcaaaaggaagacaacgaattgttgccttggtatcctctttaatccggtcttccgtttccggggttccatcccaatgagccagaataaagccacctttctctatctgttccttgaaatcatcgtatgaatccactttcacgatatgttcgttacgatagttcaatgccttctgataaatattgttctgaatatcctccaacaattgttgtacatattcttcgattccgtcgcaagaacgagtttctttttccaatgtatcacgacgcatcacttccattgtattgttttcaagatcacggccacccattaccaagcgaacaggcacacctttcagttcgtaatctgcaaacttgaatcccggacgcttattgtctgcattatcatatttcacagaaatacccattgctttcaacttgttgacaatgccttctacttttgcatcaatcttcttcagcatttcatcattcttataaataggaacgataactacctgaataggagccaaatgtggtggcaacaccaatccgttatcatcagagtgagtcattatcaatgcacccatcaaacgggtagatactccccaggaagtagcccaaacataatccagtttattatttttgtcaacaaactgtacattgaacgctttcgcaaaattctgtcccaagaagtgagaagtaccacattgcaatgcctttccatcctgcatcaaaccttcgatggtgtaagtatccaacgcacccgcgaaacgttcattagccgattttacccctttgattaccgggacagccatatacttctcggcgaagtcaccatacacatgcaacattttctgtgcttccgcttctgcttcctcgcgggtcgcatgagccgtatgaccttcctgccacaagaactccgcagtacgcaggaacaaacgggtacgcatctcccaccgcataacatttgcccattggttgcacaagataggcaggtcacgataggaattaatccagttcttatatgtactccaaatgattgtttcagatgtagggcggataatcaattcttcttccagtttggcagccggatctacgataacacccgaaccgtcctctgcattcttcagacgatagtgagtaactacagcacactctttggcaaatccttctacgtgctcagcttcacggctaaggtaagatttcgggataagcaacgggaaataggcatttacgtgaccggtttccttaaacatatcgtccaactgacgctgcattttctcccaaatggcgtatccgtaaggcttgataaccatacatccacgcacaggtgattgttcagccaaatcggccttcaccaccaagtcattataccactgagaataattctcgcttcttttggtaagttctttcaattctactgccatgctatatcgttatttttgtttttcctttttaagagtttgcaaaattagtaaaaaagcatgggaaagtactaatgatttagcaaaaatatagagtcgaaaaatataaaaataacttattgataacgataataccaccaataggtatcaccatattcccgccgcatacggtttttctcttccactggtgatgaaaattccttctgacggttaagaaactcatccaaacgccgcaccatcagcgtgtctttaacttctcttccatatccaggatgagtccgtttataaagcaccaatgcctcacgataataacgcggcaatgtatcttgctcgaaacaatacatatcaaccgccgatacaaatttatccaatttcttatccagcagcaatgcactcatataataattcaaagcggtatgtctacctatttcatcacgacagatacgggccaaaaagtctactgtctcttctgcaacatgtggtcttacaccaagatgagcatacaagctatcggcattcaagcgcaaagtttcctgagaatgaggcgcaaacaaaagcccttccgcaccataatattgagggtattcaaacaaatgctcccccatggtaccttccaaagacatagcataggctctaagcactgtcaatgtacgggttgtttccaaagactttgctcctatcatccgtgcagcttcataatgatgattacggatagcctgctccacagccagttcatgatgaaaattcacattcgtatttcctatacctaccgtcatcaggcataaaagtgtcaaaattgctaagttagagtttattaagcccaatatagaaccctcttgattcaaccaggaacgaaacacacgccgtaaagtatagacaacacctatatatataagcaaaagcaacggcagcagccaaaaccatttatcctctatgtttcctccgtggaaaatagtccggtccacatccgtcagcactcccagcaacagacaagacgggaaataagaaagtgttcgcacagggccttttaatcccatcaatccattgattccccaacggaataccaataaaaccactgtaatgatgatagctcctgccaacggagaataatgtgtctttccttgtgacaatgaataatgcaatgcacctacgacatctttctgaagcacaaaaagatagacaatactaaaaatagagaaaagaagaccgcacgcaaccgtgaggatgcgggcggctcttttataggataagctgttgttgctgctcataaattactctttcacttttttcaataccacagccgaacgggcaggcagatacagtttcagccattcctttttatccttcttataaagagggtcgaaattagtgaaatgacgtatactgtcatcagccagaccattgcctccgaaagctgtcgcatccgtattcagtaccacatcatacgccccgacaggcactaggaaaccatagtctgtaaatgacttggtaggattgaaattaaatacaaaaatcaaattcttacgccggtaagccaacacttggtcaccatcgttatgccatacctcaatcactggagtatcctgaatatttttcacactttcaatgaggtggaccatagctgaatcaaaatcgcccaagtaatggtaacacaggttcttattatcaaaaagtccccactgacgacgggcatatttatgcgaccatccgttaccttcacgtggaaaatcaatccattcgggatgcccgaattcattacccataaagttcaaatatcctccattgatggtagaggcagtaagcaaacgaatcatcttatgcaatgcgatgccacgatgcactgtataattttcatcccctttctggaaatgccaatacatatcagcatctatcagacggaaaataatagtcttatcgcccaccaatgcctggtcatggctttcggcatacgaaatagtcttctcgtccttacgtctgttggtcacttcccagaacatgctgctcggtttccagtcttcatcaatcttctccttgattgttttaatccaataatccggaatattcatggccatacggtaatcaaacccatatccaccattttgaatcggtgctgccaacccgggcatacccgaaacttcttccgcaatggtaatcgctttggaatttacctgatgaatcaacttgttggccaatgtcaaataacaaatcgcattatcatcctgattcccgttaaagtaatccccataattacagaaagcctctcccaagccgtggctataatacaacatagatgtcacaccgtcaaaacgaaaaccgtcaaaacggaactcatccatccaatacttacaattggacagcaagaaatgaatcacttcattcttaccataatcaaagcataaggaatcccatgccggatgttcacgccggccgcccggatagaagtattgattaggatcaccggcaaaattgccaagtccctccacttcattcttcacggcatgagagtgaacaatatccataatgacggcaattcccattctatgcgccgtatcaatcaattccttcaattcatccggtgtaccgaaacgggatgacggagcgaaaaagctggaaacatgatacccgaaactcccataataaggatgctcctgaatagccataatctgaatacaattatatccggcttccgctatacgcggcaatattttctcacggaactcattataagtgcctaccctttcttcttcctgagccataccgatatgacattcataaatcatcaaaggatcagtctttgcacggaacaccttctttctaaaccggtaaggattctccggctcccaaacctgtgcgctgaatatctttgtctgatcatcctgtaccacacggttagcccatgctggtatacgttctccttcaccgccattccaacggactttcagtttatacaaatcaccatgctttatagcaccgctttgtaattccacctcccatacgccaggagagttctttacatggtacatcctataatcgccatgctctttccagtcgttgaaatctccgataagataaatttccttcgcattcggagcccattcacggaacacccaccctcttctggtacgatgcaagccgaaatataaatatccggtggcaaagtccgacaaagttcctttgcctccggtcagttccaattctttgtctaatgcatgctgatggcgtccttcaatcgctgccgaatacggttccagccaaggatcactttctattatgcctaatttaggagtggtattttccataatatgattacttgttagttattctctttcaaaccaaaactttaacgatcacctttttcacgccgtcaggagacactcccggagcatgagcatcctgtggaaaaaagatggcaaacattcccggctttacaggaatatagctttcggcaagtcccggatagaacgagatatccttatctgcatcatagtctgcttcgggaagatcttcacgggctgtataacccatcacttccacccctgacagaggaatctgtatatcaataaactgattatgagtttctaattttgcttcttctttagttttaggcttggtctgagaaaagtttactaccagatcatcaccctgtaattttacttttcctaattcctgagcgttcaagtctgtagccttcagatattccattgctttagcgaacaaaggattcaatgaagcgtacttttctaagttttctaatctgtctactaccataattatttcattttaatggttaaaatattgcttttatcattcaaagtcgtctattgtgaaatttgtaaaatcagcaaaacgcttcagttgcttgaaaacatcctctactttgtccaacaggtcaggggcaaggaaaaacgcatcaggcaccatataagcacaggtataatccttacattttaaataatcaatatattcaaaatctttcggaaatcctttgggagccgtttttaagtgattttctccgataacaggaaagtattgcttgaacgcaggatcttccacaatttctctgtattcatctatgttgtcataaatggactggcggacagctttcagcactttagattccagacaccagcttccaccagcaagcatacagttatcatgctctatatgaacataatatccacaatgttctgatttctttccacgggcgttgatatagccgcccaagtgtattttataaggagtcttatcactagaaaaacgcgtgtcacgataaattcggtatgtacagtccttagcttgaataccgacaatactttcgtcaaacaacgaaatacgggcgatgattgctgtcagtaattcctcaaactctttttgagctttcagatattcatccttatgctcctgaaaccactcccgattattgtttgtggccaggttttttaaaaattgaaagataacagatacatccatgttacattatgttcatgtgttcacttgacaaacttacaaaatatatttgtaacgaactagaaaaaagcgaagtatttatttttttcccaagaccttgagaaacccatcatgcagctttccattggtagccaacacttcatgaccggaatagaaatctccccctccgctgtaatctgtcacttttccaccggcattcatcaagattatcgaaccggccgcaatatcccacggtcccagcagtccttctatacgggcttcaaagcgaccggcagctacatagcaaagttctgccgcagctgctccttgcaggcgcatacctcccacatttccatacaactcgtgcacaatatgctccgccaatggcttatacttttgcgaatcgtatggaaagcctaacgccacaaacgcttcgtccatatcagaaacatctgatacatgtatttctttgttgttcagataagaaggcgctcctttataagtccagtaaagttcatcgcggcatacttcatacaccactccaaccagcagttcttctttactacgaagggcgatactcacacaataaggagcattattatggataaaattggtggttccgtccagcgggtctaccagccagcaatagttttccgtagtcaggctgcccgaaccttcttcggcaatgaatcctgattcgggaagcaattcccgaagttgagccacaatacggcgttccgattctttatctacatacgatacatagtcgtgagcatttttcttctctaccttgctacggtcaaaaccgctacgctctttacgaagaaaagcacccgcccggagtgctatttcacgtactttcaacgttatcttctctaaatccaacattatattcttatttttgttccgcatccagcgttccaaacttataaacacctttacggattacatttccattcttgtcagtctccacaaaagcgccgtgtttcttcccttgtttgaaaaatccgtcatagcgtactccgttcttatcttcaagcacgcctttgccgtcttcctttccttttacgaaatggcccttatatttggttccgtcagccgtgcgcaaagtgccttcaccgtcggccatgttgtttttccattcaccttcatagtcatcgccgttcgcccagatatagtgtcctttaccgctgcgctggttattcacccactgcccttcatacacagcaccgttggcccatgtaaaggttccggtcccatgctgctcgccgttcttgaactgccctacatacttgtcgccattcttgtgtacataaattccctgcccggtacgttcaccgtttacgtagtcaccttcgtaacggtcaccgctattaaagtaataaatacctttaccatgctgcacgtcatccttccagtcgcccacatacttgtcaccgttgacatagtaaaatgtcccctttccgtcacgtgcgtcatctttccactcaccttcatattttgactggtcgggccataccataacgccctgtccgtttttcttgtcttctttccattcgccctcatatttggctcctgctttccaggtataagtaccctttccgctacgtttgtcctgaaaccagttacctatataaacatctccgttataataatacatagtgccttcaccctgctgatagtcggcaaaccacataccttcataccggttattattcataaaataataggttccgctgccgtgttgctgatcctggaaccattgccccacatacttttctccatcgtgaaacgtatatgtcccgttcccctcgcgtttaccttttatatattccccttcgtaggtatttccgttcttgtagattgtttttcctttaccgtttggttttctacctttcagctctccggtatattcgcccccgtctttaaaagtataattcccgatttttatctgagcggtggccaatgtactgaccgatgccaaaagcaataatatatatacgtatttcttcattggttcgttacttataatagataagatttacgccaaagatacgattttctatctttggacatgataggttattacacttttttacccgcaatgacctctattaagttttctttgcagaaatacttttgagccaatatgcgtatttcttctctggtgattccccggatggcatccagcgaacggataaagaagcgttcgtccagccctgccgtttctatataaatccaggcatcagacaaagaaaaaggtccctcgtacgaccggcataaatcgcccagcatatagttcttcaccatttccaattcttcttgaggaacgagatcattacacaatttgtccatctcccgataaacttctgttatgatagaattcacatattcattggccgcctcggtactgacagtcagtattcccgttcccggataggacacaatgcctgcgccgataccgtatgtatatcccttgtcttcacggatattggacatcagacggcttccgaaataccctccgaacaaagtgaccatgacacgtgccttcaaaaagtccggatgatgacggtccattacgaaacatcccattttcaaggaactttgaagtgcatcctcacgttctataaagatacgcttttctttggtggtaaccggaggaacaagcgttgtctttgctttttccgtcacttccccccattgtccacttcccaagttatcttctatacaacggataatttccgatgtgacctttcccgaaatatataccgaacaattacccgaatgataatatttccgataaaacgaacggagcacctccggggtaatccggtcataatcctccgctaccgcatagcgcccgaaaggatgctccggaccgaacaaggctgtattcaactgctttcgggcaatcatttccacccgggtgctgttcaccagaaattgctgtttgttcgtatcggccaccacggaaagttcctttgccggaaacgtaggagcctttatcatctcggatatgacggccagcgtgcgggcaaaatatttattcagagagtaaagtgttatgaatccatagttcacggaagaagataactccagccaggctccgtaataatccaatcgctccgcaatctgtgaagacgttaaatttccagctccctcacgcagcatcctgttggcgaacatagcctgcaacggctgttcctgattccattgtccgcctcctatcagaagatcaaaacgtacaacatcctcggttcccgcatgaatgatattcagaggcatcccattcttcatcgtcctcctgtcgggacgggttatactgaattcgcttagttggcggattggcggtggggtggttctgtccagcatttacttcccctccctctgttttaaaaatgcttcggcacgtgccagatcctgaggcgtatcaatgcctattgtctccacttcactgattcccaccttaatagtataaccattttccaaccaacgaagctgctccaacgattcagccagctccagcgaagattgtggaagcgaagttatttctttcagtacatcggcccgataagcatacagaccgatatgtttatagtaagtatgccctttcagccagccttccttctccgcgttacgttggaaaggaatgacggaacggctgaaatacaaagcattcatattcttattaaccaccactttcggagaatttacattctccaaagcttcaaacccgtcttcgggagtgaaaggtttcaccaaagtcgcaatctgtgtagccgaatcttcaaagcaagctttcacagcttcaagctgtgatctttgaataaaaggttcatcaccttgaatatttacaaccacatcatatccttgtcctactttggtatacgcttcataacaacggtctgtgccacttttatggtgaacggaggtcatgaccacttttccgccaaaagcttttacggcggattcaatgcgttcatcgtccgtcgctacgtatgcttcatccaatataccggctacttgttcatagactctctgaatcacaggcttgcctcccaagatggccaaaggtttggccggaaaacgtgttgaggcatatctcgcaggaataattccaataaatttcatggtaccatttcttttatatattcatgcaaaagtaacaaaaacatttcatacatttgcaccattaatgcaataaatgttatggacgaacaccattgtttgctttgtatgggctctaatacaaaccgttacgcgcaactctcggttgcacgggaagcattacgtgccacatttcctgatattcatttcggcgagatgatggaaacggaagctgttggcagcggctttcactcccctttcagcaatcaactggccaaattcagcacaacgctttcacccgattctgttcatgatttgtttaaagaattggaacgacgctgcggacggattcctgaagacaaggctcaaggagtagtaaaactggatattgacctactggtctttgacaataagatattaaaaccggaagatatggaaagagaatatatccgccgtggaatgtctgtgcttttttagaatttataccttttatatattaatcattattcaccttgtgataacccgcctccatatccccctacggcaaacgatagtgttactgaaagggccagcctgacaggtgggaaaacagctaagtattttcattggcagacctaaggctttctaccaggaagactaaggctttccggccgttctatttctatctccataggctttggagttatctccataacctttggagttatctccgcagcctttggagttaactccataagctttggagatagaacacaacagggaaaaaagccttaacctgccaagaaaaagaggttagccttccttgaaaaaacatttaataaaaactaaagaacacatttttttcacttcatctgtttgttgtttccaatgattccttatacatttgcgtttactaacaattctgttaaacaaatatgataatatgaaagaagaaacgagcaatacagaacaatccatactaaaagccgctgaaaaagaattccttaagaaaggattctccggaagcaagacaacagaaatagctaaggaggctggtgtaacccatgccatgctgcattattatttccgtacaaaagagaatctgttcaacaaagtatttgaagaaaaagccaagcaactggccgatacattcctttctcgtgtagatgaatcattgccttttttggagaaaataaaatgtttcattgaagcacacttcgaccttttgactgctaatcccgaactacctttatttatatacagggagattctgaccaatgaatgcggaaaagaaatttgccgtaaaaccttgttccctaatttccggttagcaatcagtctgctcgaccggtcactgcaagaggaaataaagaaaggcacagtacgccccgtcaaagcggaagatttaatggtcagcgccatttcactcaatatcttcgtctttgtggcaaacccactgatacaattgtttgtggaagaaaaaggtgaagaatatcatcaatatatggaacgcagaaaacaagaaaatgtagaaatcatattaagcagattaagaaaatgaaaaggttattcattctcacaacctttcttcttggcatcagtcccatttgtttgaatgcacaggaactcacgctggaagagtgtcagcagcaagcccgggcacattatccgctgattaaacggtacgggctgattgaaaagacgaaagaatacaatatctctaacgctgacaagggttatctgccgcaagtttcattgtccgccaaagccagttatcaatcggatgtaacggaaatacccgttgacctacccggaattgatattcgcggtatgcgcaaggatcaataccaagctatgctgcaactggaccaagtggtatgggacggtggtaacatccgggcacggaaagaggtaacccgtgccacatccgaagtggacaaacagaaactggaagtggacatgtatgccatcaacgaacgggtaaaccaacttttttttggtatcctgttattgaaagagcaattgaagcaaaaccagcttatgcaggaagaattacaaaggaattatgacaacgttacagcgtatgtaaagaatggtattgccaatcaagctgatttggatgctgtaaaagtggaacaattgaacaacatacagcaacgtcatactctggaagccacatatcgtgcttacagcgagatgttgaagatcatgattaaccaccctactcctttaaccgggaacacactaaagaaaccagatgtaaatgccttattatataaaggagaagcctattctgcagaattcatccggcgtccggaacttaacttgtttgcggcacagaatcagcaactggaagcgcaacgtaaacaacttaccgccaagaacctgcctaggttaggcatatttgtacaaggagcatacggcaacccgggactgaatatgctgaaaaatgaattttcggcctattacgtagcaggcgtacgcctttcctggaacttcagtaacctatatactcgcaagaatgaatctcgccaattaatactgaatcaacaagatgtgaacgtacagaaagaaacgttcttgtttaacactcatctggaaatcactcaaaacaacagtgaaattaagaaactgacggaactgatgaagaacgatgaggagattatcaccctacgtaacaacattaaaaaatcagcccaagcaaaagtcgccaacggaacactgaccgttacagaaatgctatgtgaagtaacagccgagaacattgccaggcagaataagattctgcatgaaattcagttattatcagccatttacaaattaaaatatacaacaaaccaatatgagaacaaataaatatatcttgcttgccgccactctgttcggtttatcctcttgcggaaacaagaaaggcgactatgatgcatcaggcacatttgaagctaccgaagtaattgtatcctccgaagccaatggcaagatcatgcaattcaatatagaagaaggacagttattaaaggccgatgaagaagtggggtgtatagataccttacaactctatttgaaaaagatgcagttactggccagcggtaaagcgatagccagcaaaagcacggacatcaataaacagatagctgccacaaaagaacaaatcggcaaagccgaatatgaaagaaaacgcacagaaaacttgctgaaggaaaatgccgccacccaaaaacaaatagatgatattgactcccagattgccgttctgaaaaaacagttggaagcacagatctccacgcttcaacgcggcaatgccagtatcacagaagaaagctcggcctacgaaatacaagtagcccaactggatgaccagcttcgcaaatgtcacattaccagtccgatttgtggaacagtactggccaaatataccgaagccggggaactggccacgcaaggaaaacctttatttaaagtggcggatgtgcaacatctttttttacgcgcttatatcaccgccaatcaattatctcaactgaaattaggagataaagtaaaagtgttttctgatttaggagaagatgaccgccgggaatacgaagggacaatcacctggatttcagacaaatcggaattcacccctaaaacaatccagacacgtgacgaacgcgccaatctggtatacgccacaaaaatagcagtaaagaatgacggatacatcaagataggcatgtacggagaaatgaagaaataaataagacaatggattatatcgtttctgtcaaaggagttagcaaaagttacggtgaagttcaagccctgaaagatgtatgctttgaggtgaaaccgggagaaatcttcgggcttatcggaccggacggtgcaggaaagactactcttttccgcattctcaccacattggtgctagccgatgaagggaaagcggaagtctgcgggcaggatgtggtgaagaattacaaagagatacgccggcaggcaggatatatgccgggacgtttttccttataccaggatttgtccgtagaagagaatctcactttctttgccacgcttttcaataccactatccgggagaactacgcattggtaaaggatatctaccaacaaatagaacctttcaaacaccggcgtgccggaaaactatccggcggcatgaaacaaaaactggctctgagttgtgcactgattcacaggccttccattctgttcttggacgaacctaccaccggtgtggaccctgtatccagaaaggagttctgggacatgctgctgaaattgaaacaagaaggtcttaccatcattgcggcaacgccttacctgaacgagatgaaatgctgtgaccgtattgcatttattcgtgaaggaaagattcaaggcattgacactccggaccatattcttcaacagttcagttcgatcctttctcctgaagggctgtcttttaatgaaccgcaagtcaccggacgatacgccatagaggtagaaggcctgaccaaacaattcggcaacttcactgcagtggaccatatctcattcaaagtgaaacagggagagatttttggtttcctaggtgctaatggcgccggaaaaacaacagccatgcgcatgttatgcggtttatcacaacctaccgggggaaaaggtacagtagcgggctttgacatagccacgcaatacgagcaggttaaaaagaagatcggatatatgagccagaagttctcactgtatgaagatttaaaagtatgggaaaacatccggctatatgcagggatttatggaatgagcgacaaggagatcgctgagaaaacagacaaggtgctggaacaattaggactcttgaatgagaaaaacacattggtccggtcacttcccttgggatggaaacaaaagctggctttctcggtagctattttccatgagccgaagatcgtttttctggatgaaccgacaggaggggtagaccctgccacacgccggcagttctgggaattgatttatcaggcggcagaacggggaatcaccgtcttcgttaccacccactatatggatgaagcggaatactgtaaccggatttcaatgatggtggatggaaaaatcgaggcgctggacaccccacaacggttaaaagaacggttccatgcccaagatatggatgaagtattcagacaattggcacgcaaggccgtaagaagttgaaaaagagatagagaaaaagagaatgaaacaatttatatcatttgtgcgaaaagaattctatcacattttccgggaccgccggacgatgctgatattactaggtatgcctgtcgtacaaattattcttttcggttttgccatcaccaccgaagtaaagaatgtaaaagtagccgtgctggatttctcaaaagatgtatccacccggcaaatcatcgacaaactggatgccagtgactatttcaatgtcaacaagatgctatatgacaacgacgagatagaggaaacactccggaaaagcagttcagatctggtcattgtgtttgaggccggtttcgataacaatctgcggcataccggtaaagcccgagtacaactgatagccgatgccaccgatcccaacaatgctaccatactgacctcttacgcatccaatattattgcagattatcagcaaagccggatcatgcaacaacaatcacccatacagattatcccccaaataaagttattgtacaatccgggtatgcaaagtgcctacaattttgtgccgggagtaatgggattgattttaatgttgatatgcgccatgatgacttccatctctattgtccgtgaaaaagaaaccggtacgatggaagtattgctggtatctcccgtacgtccgctatggatgattatagccaaaatggtaccttactttgtgctgtcatgcgtcaatctggtcacaattctgctgctgtctgtttatgtattacatgttccggtagcaggcagtcttttttcgttggctttgctctcatggatcttcatcgtagtatctctgctgttgggattattggtttccactatcgcccgtacccaagtggaagccatgctgttttcgggaatggtactaatgatgcctaccgttctactttccggcatgatattccccatcgagaatatgcctcttcctttacagctgatttcaaatgtcatccctgccagatggtatattgtcggaatcaagaaaatcatgattgaaggattgagtatcagttatgcacagggagaaatgggtatacttatgctgatggctgttgtccttttactcatcagcctaaaaaagtttaacaaacgattagaataagctccggaagatatgataaagtatttattagaaaaagaattcaagcaactgctgcgcaacccgatgcttccgcggatactgctcgtatttccctgcatcatcctgctggtgttgccttgggccgcaaactttgaaatcaagaatatgaatctcagcgtagtggataatgaccgcagtccctattccacccgactggttcagaaggtgggagcttccgaatattttcatctggtagatgtttcaaacagttaccaggaagcgatgcaatgcattgaaaaaggagatgctgacctcattttggaaatcccgccacacttcgaacgcgatttgctgaaaaccggtgtagcaaaagtactggtttcagccaacaccgtaaacggaacgaaaggaactttaggaagttcctacctcagtaatatagtgaatgcctatgccactgaaatccgggcttcccattccggctctatttctccctccccggtgataaatatagatacccaaggacatttcaacccctatctggattataaggtatttatggttccggcactgatggcacaattgttgatgatgttatgcggctttctgcctgctcttaatattgtgagtgaaaaagaattcggaaccatcgaacaaatcaatgtgactcctgtaagcaaattcactttcattctggccaagctgattccttactggatagccggcatactgatcctcacaatcggtatcattctggcatggttagtttatggtctggttccggccggtcatttatggctgctttatttctttgcattattattcattatcgttatctcgggcatggggctggtagtttccaactattcccaaaccatgcagcaggccatgtttgtcatgtttttctttgtgattatcatcatgctgatgagcgggttgtttactcccatcaacagtatgcccgaatgggcacaaaccataaccattgccaatcctttgaagtacttcatacaggtaacacgtatggtttacctgaaaggaagcggattcagtgacctgattatgcaatttatcgccttgttccttatggccatcgctttgaacggttgggcggtattcagctacaaaaagaattcataacagataaatcggaacatttacttgtttatcattgttaatatcagtagcttagcaatctgttgctaacctgatttttaattatctaaaagaaaaaagttatgaaattctttattgacacagccaacctggcacaaatccgcgaagcaaatgcattgggcgtactggatggtgtaaccacaaatccgtctttaatggccaaagaaggcattaaaggagttgagaaccaacataagcattacattgaaatatgtaatatagtggatggagatgtcagtgccgaagtgattgctaccgattatgaaggaatgattcgtgaaggcgaagaacttgccgcccttaacccacacattgtagtaaaagttccttgtattgaggacggcatcaaagctatcaaatatttcagtaataaaggaatccgcactaattgtacactggttttctctgccggacaggcattacttgcggcaaaggcgggggctacctatgtatctccatttgtcggcagactggatgatatttgtaatgacggtgtaggactggttgcacaaattgtagaattgtaccaaacttatgactacaagacacaagttcttgccgcctccatccgaaacaccttacatatattacaatgtgcggaagtgggagcagatgtagtaacctgcccgttatccgccattaaaggccttctaaaccatccattgacagatataggattagaaaaattcctggccgattataaaaaggtaaacggataataaaaaacgttccctcgccaatccaaaggtgggggaatttgttttccagacattatttaaatttcaagtatcctatgcgagtatatttaattcctttactctcataatgagaaaggactttggccgatttaatatatagactttcatgaggattgattttctttgtatagcagctcagcatctccggtgacatgctggaagcagctgcctttatgataaaagtataacgattaccatcagcatcagcagcaagtacactctgatctacatagtatccagtcgttttataagcatctagttgtaatcttgtccccaggacttccagatgtaaatcggtcagcctttctcccggctgaccgataaaacgactcccagccggcaaatgatgttttctgatgaccgtttcataatgaactgtggcaaaagcctttgccaatactgctaactttttgtctctggggttacgggcttcaaacttatgtgccaaccaaagcacatagttaggatcaatataatatacttccgccaacctttttccacgatacttcccaaatgcaactatatcttcggacagaccataataaggttcaaagaaagtgttatccttcactttcagcaggacattgcaattctgcaaatactgaaaagcacgctctgccgcatcattaaatgtaactgccaacgactgaataaacagaggagagtaagtattatccggaaatatacgccataaagcataatacgaacgataaggagtggaaacactgattgcataaaatcccgcatcttctctacggcctttattgaagttgtctatcttttgaaaaactctctcggccataacgctagtgatctgatatagggttacatctctatccatagttacctcctatctttataaggtaaagattttcttttcgtaaatatagcatttttcgatgaaaggacaaggattttcaccatttttacataaattattttctataatataaactgccgtgtgaacaggaaaagtaatagttcataaaagtatatatagaaaaaagtctgcttgctttccttcttgcaaacagactttgtacttataaatctaatcttctaattactcaaatatattgtccaatcctccggtttcttctaccgaagtttcatctatcaaagtatccttgcaaggatcaaagtcatcaggaatattgaatttctcgtcctgagagtatcccaagctcttgtccttatagactttctgcatataaagcccccagataggaagtgccatagcagccccctgcccgtccaccatcgtatcaaagtgaatatcacgctcttcaccacctacccatacaccagataccaatgaaggggtgaatcccatgaaccaaccgtcagaattacggttggttgtacctgtctttcctcccatatcggcagtaataccatatagacggcgtacacgcccacccgtaccttcattgatgaccgcacgcagcatgaccaacattttataagcacttgtttcactaatcacctcatccatttgtggagtgaaattcgccaacacatttccttcattatcctcaatacgggttacaaaaacaggcgctgtacgaataccccgattagcaaatgccgaataagcactgaccatttctcctacagaaatctcacaagggcctaaacaaagtgaaaccaccggatctatctgtttattttgtacaccaaatgaatgaatcagacgaactagctgataaggattcagtttccccatcaaataagccgttacccagttatcagaatttgccaagccccatttgatggtaaccatctctccgtaacgcttcttgctggcattacgcggtgaccatggacggccattttcatctatcaaggtctgctctacatggcgcacctggtcacagggagaaaaaccattctccatagctaaagtatatacataaggtttaatagtagaacccacctgacgacggcctaccatcgccatatcatactggaaataattatagttgggtcctcccacatatgcttttacatgaccggtcaacggatccatagacatgaatcccgctctaaggaagaacttatagtatttcaaagaatccatcggagtcataatggtatccttttccccctcgtatgagaatacggacatttcatatttagtattgaacgctttctttatttctgcttccgaacaccctgcctctttcatgatacgataacggtcagtctgcttcatggccctggtcatgatagaattcacttctgcctctgtcagctgattcgtaaacggagccgttttctttttccgtttttccttgaagaaacggggttgcaaatactgcgccacatgttcgtaaacagcttcctcagcatatttttgcatacgtgagttgatagtggtataaatcttaagaccatccgtatagatattataattagtaccatctttcttcttgtttttagcacaccaaccgaaaagaggatttgtcttccaagccaatgaatcctcataatatttctgcatctgccatccgcggtagtcacttttcttcggttctttagccgtcatcactccacgcagatattcgcggaagtaagtagccagtccttccttatgatctacacgacgatatttcaagaccaatggcaatgcctttaatgaatcagcttccgcatcagtcaggtaacctgctttgcgcatctggtcaagaacaacattccggcgtccgcgtgaacgttcattaaaacgtttcggattataaagtgaaggattcttacacatacctaccaaggtagccgcttcctcaatgttcaggtctttcggctcttttgaaaaatatgtattggcagctgtcttgataccgactgcattatttagaaaatcaaatttattaagatacatggtcagaatctcttcttttgtataataacgttccaactgaacagcaatcacccattcgataggtttctgcaacaaacgctccatcacattatccgccgtaggtgaatagaactgctttgccaactgctgagtgatggtgctacccccaccggcattcttctgcatcatcaccccccgtttcaccaaagcgcggataaacgcacgggcgtcaatgccggaatgttctgcaaaacgttcatcttcggtagcaatcagtgcatgaatcagattcggtgaaagctggtcataacccacaaatacgcggttctccttactaagtgaccaagtgcccagcatcttgccatcatcggatataatctcggttgcaaactttaaattcggattttccaactcttcaatggggggtacatatccaatccatccttttgctatcgcggtgaatatgaacgctataaccaacagtatgccgactacaagagcccaaagcacatatataaatttcttcctcatgacgttttctagtaattaacgatgcaaaagtaaggaaaaactttgagatagaatgtgtttctaacaaagttcaacgaaatatcttttaaatcttcgctcatttatttttttttcatacctttacactccgtataagttgtaattataaatacaagccaaaatggaaaatagaagtttagttactattgccgaacactcgaaagagaaaatcctctacctcctggagatggcaaaagagtttgaaaagaagcctaaccgtaaaattttggatggcagagtagtcgccactcttttcttcgaaccctccacccgtacacgactcagttttgaaaccgcagcaaacagattgggagcacgcgtcattggatttaccgatcctaaagtgaccagttcctcaaaaggagaaacattgaaagatacgatcatgatggtaagcaattacgctaacattattgtaatgcgccattttttggaaggtgctgcaagatatgccagtgaagttgccccggtacctatagtcaatgccggagacggagctaatcaacatccatcacaaactatgctagacctctactccatatacaaaacacagggaacgcttgagaatctgaacatttatttggtaggcgacttgaaatacggacgcaccgtccattctctgctgatggctatgcgtcacttcaatcccactttccacttcatcgctcctgaagagctgaaaatgccggaagaatataaaatatactgcaaggagcacaatattaaatacaaagaatatacagactttaacgaagaaacgatcgcagatgccgatattctttacatgacccgtgtacagcgcgaacgtttcaccgacctgatggaatatgaacgtgtaaaagatgtatatatattaaggaataagatgctggagcatacccgccccaatctgcgtatcctgcaccctctgccccgcgtcaacgaaatagcttacgatgtggatgagaatccgaaagcttactatttccagcaggcacaaaacggactttatgcgcgccaggccatcctttgtgatgtattgggcataaccttgaacgatgttatagaagatgcaaaaaagtaaaaaacaaaaatgaagatgagcgataataaacaagcattgcaggtagccgctttgaaaaacggcactgttatagaccatataccttccgataaattgtttactgtagtcgccctattgggattacaggattcagactctaacataaccatcggaaacaacttcgagagcaaaaagctaggtaaaaaaggaattatcaaggtggccgaccgcttttttactgatgaggaaataagccgcctttccgtagtagccccgaatgtgaaactgaacattatccgtgactatgaggtggtagaaaagaaacaagtcctgatgcctcaggaattacgtggcattgtaaaatgtgccaatcccaagtgtatcaccaataatgaaccgatgatcactttattccatgtaatcgacaaggaacacggcatcttaaaatgccactattgcgagaaggaacaaagcaaggaaggtattaagctgatttaatcattatgaaacaagactggaaaccgggaacaatgatttatccccttccggccctattggtcagttgtgggagtacggacgaagaatataacattatcacagtggcatgggcaggtactatttgtaccaaccccgccatgtgttatatatccgtacgtccggagcgtcattcctatcccatcttgaaacgaaacatggaattcgtcatcaatcttacaactaaagagatggcatttgccaccgactggtgcggagtgcgttcaggcaaagattataataaattcgaagaaatgaagctgactccgggaaaagcgaaaatagtcaatgctcctattattgaggaatctccactctgtatagaatgtagggtaaaagaaattatctcactaggatctcatgatatgtttattgccgatgtggtaaatgtgaaagctgatgacaaatacctgaacggagaaacaggaaaattcgaattatcccaagctaatccgctggtatatgttcatggcggctattttgagctgggaccgaaaatcggaaagttcggctggtctgtagaaaagaacaggatgcggaccaaagaaaaagcctaaagacacctcatgaagaaactccttttattgatcgctttattgctcctcaccttatccgttccggtacgaggagagaagaaaggtttgcaagaagagcctaaaatcaatgtgggaataaaaggaggcttcaattcttccatgtactttaccagcaggctggagttagacggagaacgtatggaagatgtgcaaaataattataaggtaggctatttcgccgccctatttttccgggtacacatgaaaagacacttcatccaacccgaaatgatgtataatgtctataaaggtgaaatagctttcaataagaatcagaataatgaaaatacccttcccgaatttgccaaactgaacagcacaattcattctttggaattacctatactatatggctatagttttgtaaaaagccgtccttatggcatggcactttttatcggccccaaattagaatatgtatggaaacataagactgatgaagagtttgaagggttcgggcattccggcataaaagaagaattacgccccatcaatataagttccgttatcggattaggcgtgaatattgcaaatatattcttcgatttccggtatgaaatcggactaaccaatatatccaaatcaatcatttacgaaaagaatatagatggagtcatatttcaggaaaaaggtatcttcattaatcgtcatcgcaatgtattaagtttctctctaggagttattttttaagcagtcatactcctccgtaagaattccgacatctatcataatatcacattctgaagagttttctaccaaagaataaaactgaggatcaaccatttccggtattttacttcctatgaaacgacaaaaagaaagtcacacgtgttttttctgtaattccactaaagattttcttctaaataatttccttatattctaaaattacttaactttgtgaactcagaatcgaatatcgcacataaacttattataaaaagaaatgaaaagagacgatttgattttcgacattatcgaaaaagagcatcaacgccagctcaaaggtatcgagctgatcgcatccgaaaactttgttagtgaccaagtaatgcaagctatgggttcttgccttaccaacaagtatgctgaagggtatcccggcaagcgctactatggcggttgcgaagtggtagaccagagcgaacaaatcgctatcgacagactgaaacaaatcttcggcgcagaatgggctaacgtacaacctcactcaggagcacaggctaatgctgccgtattcttggccgttttaaatccgggtgataaattcatgggattaaatctggctcatggtggccacctgtcacatggttcattggttaacacatccggcattatttatactccatgtgaatacaatctgaacaaggaaacaggacgtgtggattacgaccagatggaagaaatcgcattacgtgaaaaaccgaaaatgattattggtggcggttcagcatattctcgtgaatgggactacaaacgtatgcgcgaaatcgcagataaaataggagctatcctgatgatcgatatggctcatcctgcaggtctgattgctgccggactgctggataatccggttaaatacgctcatatcgttacttcaacaacgcataagacccttcgcggtcctcgtggcggtgttatcatgatgggcaaagatttccctaatccatggggcaagaaaactccgaaaggcgaaatcaagatgatgtcacaacttttggattctgctgtattccctggtatacaaggtggtccgttggaacatgtcattgcagccaaagctgttgcattcggtgaatgtttacagccggaatacaaagaatatcaaacacaagtaaaaaagaatgcagccgtattggcacaggctctgattgaccgtggttttacgatcgtttctggtggtacagacaaccactccatgctggtagaccttcgcaccaaataccctgatctgacaggcaaagtagcagaaaaagcattggttgctgctgatatcactgtaaacaagaatatggtcccatttgacagccgttctgctttccaaacttcaggtatccgtttgggaactcctgccatcacaactcgtggcgcaaaagaagacttgatgttggaaatcgccgaaatgattgaaactgttctttcaaacgtagacaatgaagaagtgattgcacaagttcgtgcacgcgtaaacgaaacaatgaagaaatatcctattttcgcttactaattaacgacttctatcaatatactcataaaaaactttggagttttttgaaaaagctttatccttcttcaagaacttcaaagtttttttatgaaacatccagaccatttaaaaagagtaatagaaaagtatttttatcagcagtccccacagaaatcagtataaatttctacctttgcagacaatttatccgttaatgacgaatgaaaggaactaagaatctgactcaaggccctatcctgaagcaattgtttactttggcaatgcccattatggccacttcattcatacagatggcatatagcctgaccgacatggcctgggtaggaagaataggaagtgaggcaatagccgctgtaggttcagtgggtattcttacatggatgtccacatctatctccctgctgaacaaagttggttcggaagtcagcgtaggacaagccatcggggcacaaaacgaacaagctacccgtgcgttcgcatcacataatcttaccttgtccttacttatatcattaagctggggagcattgttatttatctttgccacccctattatcagtatctatgaactggaacctcatatagccaagatggctgtggaatatctacggattatagcaactgcctttccattcgtctttttatcagctgcctttacagggatattcaatgccgccggacgaagcaaaatacctttttccattaacggtatcggactgattacaaatatgatactagatcctctttttatctttggtttaaactggggaactacgggagccgcaattgccacttggctggccgaagctacggtatgcatactgtttatctatcaattgaaacaaaagaaaatattatgggatgactttcggttatttactacactaaaaaaacaatatacacaccacatcttgaaaataggattaccagtagcggtactcaatacattattcgctttcgtcaatatgtttctcggaaggaccgcaacagagcaaggtggtcatttagggctgatggcactcactaccggaggacaaatcgaagctatcacctggaacacctcccaaggattttctacagctctcagtgcttttgtagctcagaactatgcagcacggcaaatctcccgtgtactgaaagcctatcgcaccactttatggatgacatttatattcggatctttctgcacatttctttttatatgttacggaaacgaaatattttctatctttgttcctgaaaaagcggcgtatgaaaccggtggcgtatttctacgtatcgacggatactcgcaactatttatgatgctggaaattaccatacagggcgttttttatggaatggggcgcaccatgcctcctgccgtaatcagtgtcacctgtaactatctgcgcatcccgatggcattattgtttgtatcatggggctggggtttgccgggtatttggtggagcataagcatcactagcactatgaaaggaattatttgtctgatctggtttatacttatcaagaagaaagctttaaattaccaggctgtttaatgaacaatttttgcattaagtcattaatatattaaaatgaacatgattatgaaaaagactaaaattatggctttattactgagtgcaacactagtattcagtggatgtggtaatatgaataataccgctaaaggcggtctgatcggtggcggtggtggcgcagctttgggagcaattatcggcggaatagccggacatggtaaaggtgcggctattggtgcggcagtaggtgcggcagtaggtacaggcgccggcgtgttaattggaaaaaaaatggataaagcggcagaagaagcggctcaaatccaaggagcacaggtagaacaggtaacagataacaacggtcttcaggctgtaaaagttacttttgattccggtattctcttcaatacaggaaatgcagccttgagtgcacaagcgaaatcagccttaagtaaatttgcaaacaacgtattgaaccagaacagagatatggacgtatccatttatggatatacagacaatcagggctggagaaacagtacagccgaacaaagcatccaaaagaacctcaatctgtcacaagaacgcgctcaaagtgtggctagttatttgctaggttgcggtgtaagtaattctcagatcaagtctgtagaaggtttgggtcaagcagacccgataggtaataatgacacagccgaaggacgccagcagaatcgtcgtgtagaagtatatatgtatgccagccaacagatgattcagcaagcggaagcaggtacactgaaatgatatcaatgacgttatcatagagcgtatccaatacgcccgaaccaacggtcacaactttggataacatataaaataaatcaatttcggacaggttatttctgcccgaaattgattttaatacacaagcatgaaaaaaaagattttaaaattcattcgcaatctgctgctttttttctttggttcttccattctcgcagttatcgttttacgctttattccggtttactttaccccgttgatgtttatccgaactacccaacaaatcattcatggcgaagatataaagtggaaacactcttggatacctaaagaaaacatatcccctcatctgcctatggctgttattgcttctgaagacaatcgctttgccgagcataatggttttgacttcaaagaaatagagaaagctttagaagaaaacaagaaccgaaaacgtcctcgaggtgccagtactatcagccaacagacagccaaaaacatttttttgtggcctgcttcttcttggatcagaaaaggacttgaagtgtatttcaccactttgatagaactattttggaataaggaacggattatggaagtctatctgaactctatagaaatgggaaatggtatctatggtgccgaagcagtagctcgtgaacactttcacaagaatgccagcaaactgacaccggaagaatgtgcactaattgcagccagccttcccaatcctcgcaagttcaattcaagcagacctggcaactacatgctcaaaagacaaaagaagatcctttatcttatgaaatgcgtccctatatttccaccccaacaagatacaccttctacggtttcaaagaagaaaaagaaataacccgcacccccgtgtgggctttcttatttttagagtattcaaagagagtctgcgaatctagaataactttcttcatgaccgatgaagcatgaagcaaatgcaatttaccatccacccaacaagcaaatcctgtatgtaccacatccagcccttttatattggtggtaatcgctatgatatccccattctttatgtccaattcctcagaagaaacattcagacttgttttaggaatataagaaacaggaacatttttccattttttctctatttcaatcatctgggatatcatggaaggattatttttcaaccgatgataactgtcagaatgtgtggacataaaatccaaattcaaaacttgtgatgcagcaaaccctaattcccccgtgcgttcatgtacaattcctttttgttcattatccttaatccaatcactgaagtaatgcaaacgcgagacataaccggcttgtttcccattccgatagcggatacaccgcaacgcttttttgtaactttcaaagtcacttttcccatacttatcagtaaggctcaatgcaagtactgtttcaactaacgtggtacaatccaccttatccaaatgcacaactaaggtttcttcatctgtcccatccaatgtattcgctacgtatggaactcctaatagattttgggcaaaaaacaatatcttacagctatcggccggcaatcgggcagctttttgaagcagactctcgacttttatactgtcattttctgatgctgaaacaatacagggcattactcctaaaattattcccagcaaccacgaatacagttttctcata

SEQ ID NO: 163 - DNA, 103218 bp, Phocaeicola dorei
  source 1..103218: mol_type = genomic DNA
aaatgcaaaagtacaaaagataacacaaaaaacactaaaaatcagaagaaaaatattagtcataccataaaaaataagaggtatgattagaaaaaactgattatttgttgagcaaattgattataccaatcttataaatatttgatatacatcaaaataccaatcaccccatttctctcagaaagagaaacaccgaaaataggagaaatttcctatacgaatgccataggaatataatgaacaagtatataccctatactttcagttgtatgacaagatggattcagaaaggaaaaagccccgtgaaagtacaaaattcttgcttgaaaaagattgaataaatgacggttttctccataagagaaatgttttgaatatgcaaaaatacataaattattgaacataatagcataaaacaaagaaaaaccttaatagccacctcgttaaatgtcgtggttacataacaaatgttgagtaaactagattgtatttacagcgaataatccctgtaaatcaattatatatgttaaatatttatgtcctctatttctcttatggagaaaaataggaatgcggcaagataaaagacggcatgaatggttgatatgacagccaaaaaagacataaattactataatacagaccaatacataagttggaatgaactatgggtatatcttgacctgccgtaataactaaaaaacacacgacgaatgagtactcccataaccacaagggaagatctaactagaatccaatggttcgccatgagcgcttataaaaacgagaaaaaggcggaagagatgctcaaaggcaaggatggtctagagtatttcataccgaaacactatgccgtaagggtctatcacggagtgaaatccaaaaggcttgtaccagtcatcccgaatctcgtcttcgtgcatgcttcccgaaaacagatcacggatttcaaaaaaaaatataatttcttacaattcatgatgtgggagaaaagcacgggactgaaatatatcgtggtgccggataagcaaatggagagctttatcaagattgcctcgcagtatgaagaaaacactatttattataaaccggaagagattgacatacggaaaggtacccacatatgtatttacggtggcaagttcaatggagtaaagggcgtattcatgcgggtgaaaggaaaacgtcgccgccgggtggttgtgatgcttgaagggattatgggtatatcggtagaagttcatcccgatttgattgaagtcatcaatgattccgattgtgacaaattttgagagatgacacaaaaaggagatgatgaagttccccttcctcgtggccttacacaaataaaataatatttgaatatatgtatttttggattgtaaattgttcactggcatttttgctttgtgttctctgtgcgggtatcgtcattccccagattctgctaatcgctttccgtaagaaattgttcgactttcccgatgagcggaaggtacatcattgtgcggtgccccgattgggtggtatcgcattcaagccggtagtgtttttcaccatagccctgttgctaggaatcaatatggtgctgggacattcggagatattgtccgaaatcgggaacgacgtgtgctctttggcttttgctttctgctccatcatggtactatatctggttggcatggccgatgacctgatcggtatccgttatcgtgccaagtttgtcatccagattctgtgcggcgtgatgcttattgccggtggggtatatatcaacaacctatacggtgttctgggcatccatgcggtgccgttatggttaggatatcccctgaccatcctgatcgtggtcttcatcatcaatgccatcaacctgattgacggcattgacgggctggcttccgggctatgcagtatcgcctgcctattttatggactgactttctttatgctccatcagtatgtttatgccatgctggcgtttgccacattgggagtgttggtaccattcttctattacaatgttttcgggaacgccaaacacggaaggaagatcttcatgggcgacacaggcagtttgaccatcggcatgatgctctgtttcctcagtctcaaactgaccatgtgcggactagacgataatacaggaaatgtacatccgatggtgctggccttctcacccttgctggttccatgctgtgacgtggtcagggtttacctgcatcgggtacgcaacggaaagaacccgttcctgccggacaagaaccatatccaccataagctgcttgctctcggaataaagcagcgcaataccatgatcatcattgtttccgtgtcaactatattcatactgctcaatattcttctgtccctttatctcaatgtgaactggatcgttttgggtgatatattgatatggactctcgccaacatcaggctgacaaaatctatcgcacaacttcaatcggaacagaaaaccaacaaataaaaatcaataaatatgaaaatcagatacattttatccttattaaccgtggcctttctattgggatcatgtgccacaccgaaagtcgcttatttcacggacctgaaacggggtaccgcagagcaagtcttgaacccgctggaaatccggatacgtccagaagacaagatttccatacaggtcaacagcaaagaccccttattaatgaaccttttcaaccttccgatcatatcccgacagattggtacgacatcaggtacatccaatagtcagggaatatcaggatatacaataaataaggatggggatattgattttcctgtgctgggacatatccatgtggcaggaatgacacgcgcggagatcgcctcgtatataaaagaggaattggtttcaaagaatctcgtgaaagaccccgttgttacagtggagtttatgaacctgaccgtttcagtgttgggcgaggttgccacccccggacgtttcaatatcgaaaaggacaagctgacacttttggaggccttaagcatggccggggaccttaccgtctatgggaaacgggaaaacgtgctggtacaacgggaggaaaacgggaaaaaaaccctgtatcaggtcaacctgaattcgggatatgacctttatgcctctcctgtgtattatttgcagcagaacgatatcgtttatgtggaacccaactcaatgaaagcacggcaggcgaccgtcaacggcaataacgtccgctcagcctctttctggatgtcattggcctcgttgctgacgaccattaccgtgttgattgtaaaataatatagaatcagatatgatgaccgtaaatcaaaagaatataaaaccggggcagcaggatgatttcctgcgaatacaggacctgttatacctgtgcctcgcaagatggaagtggttcgtcttgtctttagcggtaacgatcggtgccgctactgcctatctgttacgcactcctgccgtatatacacgtaccgcttcggtattgatcaaagaggattccaaaggcaagtcggtctcctcggatttggaatccttctcggagttcgggctgtttcaatccggtacaaatgtgaataacgaactcatcacctttcgatcaccgtctttaatgaccgaagtggttaaacggttgcgtctggatatgaattacttcgttcggggaaaattccaccgtcaggtagcctatggactgacattaccggtggatgtaacgataaatgacttgcctgagaatgaatcagccggttttacgttggaaatacagccggacggtacgttatacctatccgactttatacgtaacgggacagatcttgaagaaaaggacgtaaagggaagcttgctcgactccatcactacgccattgggaaaaatcattatccatacaacacccaattacgtgaaaggcgaggcatatacattatatgtaggcaaatccagtctgtataacgccgtcaactcctgctcgtccaatctgtccgtttcattgaacagcgagaaagcgtcagtcatagacttgtcattcaaggataactccacacagcgggcagaagatgtattgagcatgttgatttccgtttataacgagaattgggtgaaggacaaaaaccagatcgctgtcagcacctcaatgttcatcaacgagcgtctgggcgtaatcgaacgggaactgggaaatgtggacgaggatatctcctcttacaagtcagaacatctgttgcccgacgtgcaggcggcatcgagtatgtatatggctcaaagcagtgcggccaacgcgcagatcctgtccctgaacaaccagctttatatgacccgttacatccggaactatttagccaacgatgccaaccgtacccaactgcttccggccaactccggcattgaaagcgccaatattgaatcgcagattgccgaatacaacaagcaactgttgcagcgcaacagtctggttgcgaacagcagcacggaaaatccgctggtcgtggatatggatcaggctctggcatccatgcgtggggcgataatcagatctatcgacaatcagatagtgaccttgaattcgcagataaaaagtttgcggcagacggagcaacagacgacatcacgtatagcggccaacccaacacaggccaagtacctgctttcggtggagcgccaacagaaggtaaaggaagctctttacctattcctgttgcaaaagcgtgaagagaacgaactctcacaggcgttcacggcttataatacccgcattgttaccccgccacacggcagcatgttgccgacatcccctgtgcataaaaatatctttatggtcgcattcgctctggggctgctcattccgatagtcattatcttcatgcgcgagaatatgaatacccgtgtacggggaaggaaagacctggaaaacctgactataccgttcatcggtgaaattccgctgttcacaagaaagaaaaaagggatattaggaaagaaaccgcaggaagtcaaggccgttatcgtcaaggagggcaaccgtgacatcatcaacgaggcattccgcgtattgcgtaccaacctggaatttatgaccggcaaggacaagacttcgaatgtcatcatcatgacctcattcaatccgggcagcggcaaatcgtttctgaccatgaacatcgccgtgagccttgccatcaaaggaaaaaaagtgctggtaatcgacggagacctgcgccacgcctctgcatcatcctatatcgactctcctgacaagggattgagcgactatctgggaggtcgtatcgataatctggatgagatcatcgtacccgatccgaaacataaatctatggatatactacccgtgggaacgattcctcctaacccaacggaattattgttcgacgagcggttaaagcagacaatcgatactgtaagggagcaatatgactatgtgctgatcgactgtccgcccgttgaactggtggccgacacgcaaattattgagaaactggccgaccgtaccgttttcgtagttcgtgcaggattacttgaacggagtatgcttgctgaattggagaaaatctacgaggagaaaaaatacaagaacatgtccctgatcttgaacgggaccgagggaagtggcggtcgctatggataccgttatggctatcgatatggttatcactacggttacggctcaggataccactaaggttccgacggaaaacagggtggggataaatggatgattattaattaaaaaaaataaaatgttttatataaaaatactcgtatcattgtgtggccattcaggaaacgtatatcgctgaaagatagcggtatattcaagaattttaccgactgtcactcgcacattctgccgggtgtggacgacggtgtgcagacgatggaagaagcattggaaatactgcgcctgtatgaagagttgggcataaaatccgtatggcttacaccgcatatcatggaagatatgcccaacaccacactgcacctccgggagcgttacgctgaacttcaagccacctatagcggtccgataaaactgcatctggcctcagagaacatgcttgacaacctcttcgaggaacggttggaaaagaacgatctgctgcccttgggtgaaagcggtgaccatctactggtggaaacctcctactttaaccctccgatgggattgaacaacattctgctccgcatcaaggctaaaggctattatcccattcttgcccatccggaacggtatgtttatatgggtgagtcggattatcaacaattaaaagacatgggagtgaagtttcagttcaatcttccgtcaatagcgggtatgtatggcaaccggattaagaaaaaagccatgctgctattaaaagaaaaggctattactcatataggaacggacattcacaattacaatatatttcaaaagttcatttgtacgagtattacaaaaaatatacaaaactgtttaattgatagtcagactgttatagtttaaatagattataattatcggttattaagacctgtagattctgtttaactttttctctctaggtggatttgcataaaatacatacaaaaaaatccaacaggctggaattcaatggaaattgtaacaatcgacttggagcagatacacacaatctctcttttatccaaaccagtcttaaaataaatcattacacccctatcaagcaataggcttgcaacttcaacataaaacaacaatccatatgtcattaacaaaagttttagttactggtggagcgggattcatcggctccaatttatgtgagtatttattggctcacgactatgatgtaatctgtttggataatttttccacaggtaaacctgaaaacatttttccatttctacaacgatatccgaataagtttaaacttatcgtaggagatatacggaatctgaacgattgtaagaaagctgtagaaaatgtagattacgttatgcatgaaggagcattaggctcagttccacgttctatcaaagatcctataactacaaatgaaactaatatatcgggattcttaaatatgctgacagccgctcgcgatgccaatgtaaagcgttttatatatgcagcaagttcttctacatatggagacagtcagtctcttcccaaagtagaagatgtgattggtaaaccgctttcgccttatgccataacaaagtatgtaaacgagctttacgccgatgtgtttgccaaaacctatggaatggaatgtatcggcttacgatatttcaatgttttcggtcgtcgtcaagatccattcggggcatatgctgcggtgattcctttgttcgttaagaaattcatggctcatgagagtcctgtcattaacggagatggtgaatatagccgcgattttacttatatagacaatgtgattcaaatgaacatgctggctatgaccacgacaaatccgaatgcaaccaaccaagtatacaatactgctttcggagaacgcaccacattaaaccagttggtcggttacttgaaagaatttttgagtgaatttgaccccgaaattgccaacgtgaaaataattcatggtcccaaccgcttgggggatattccccattccttggcatgtattgataaagcaaaatcccttttaggttacaatcctcaatacagtatgcgtgacggtttgaaagaggctgtcaaatggtattggaagaatatttaaagtaataataacagatgaaattatgaatgaaactaaaatttgcgtaattggtcttggttacgtagggctccctttggctcgtcttttctcgacaaagtataaaacgataggttttgacatgaaccaagctcgtgtgactgctttgatggcaggtcatgatgcgacactcgaagtgtcagatgaactactccaatctgcccttgccaatggttttaagtgtactgccaatatagaggaaatccgtgattacaatttttatgtagttgccgttcccactccggtagacaaaaacaacaatccggatttgactccgctttacggtgccagcacaactgttggtaaggtaatctccaaaggggatattgtggtgtatgaatctactgtttatccaggtgttacagaagacgaatgtatcccggttgtggaaaaagtgtccggattgaaatttaatgaagatttctttgctggctatagccctgaacgtataaatccgggagataaacttcatacagtagaaaaaatcaaaaaggttacttccggttctacgcctgaaataggtaagaaagtaaatgaggtatatgcttctgtaattaccgccggtacacatctcgctcctacgatgaaagtagcggaagcagccaaagtaatagaaaactcacagcgtgatatcaatatcgcatttgtgaatgagctatccaagatatttactaaaatgggcattgatacacaggatgtactggaagcagcttctaccaaatggaatttcctgccatttaagcctgggctggttggaggccattgcattggagttgatccgtattatttggctcaatgtgcacaacgtcacggttataatcctgagataatcttagccggtcgccgaatgaacgacggtatgggggaatatgtggccaaccaagttgcgaaattgatgctgaagaaaggaatacaggtgctcaactctcatatcctcatattagggtttacttttaaagaaaactgtcctgatgtgcggaacacaaaggttatagatatttacaatgctttgcgagagtataacgtacatatcaccgtatatgatccttgggccaatcctgatatagttatgcgagaatatggaatctcggtaacgaaccaacatcctttggataagaaattcgatgcggcaattatagctgtagcacacgaacagtttataggctttgatgtaaaaacgttactaaatgctcaacacgtcatattcgatgttaaagctatctttgaaaaaaacgttgtagatggtagactctaatcggattgtctcctttgacatattgaaagggggaggaattttattggtcatccttggtcatatacaaatcccttacatgttgaaaaccgttatttacagttttcacatgccccttttcttttttgtgtcaggctgtttctttcgtccaatcagtttgagagagttttttgcaaaaaagaccagacaattactgattccttgggccttttttgcctttttgttgttcgcatatttgttcgttttgaaacttaacgaaactcataattgggcaaaagcgatctcgctccctgtaacgagtatgtttgatggttttctcggtgatgaaaactcttttattttatttcatgtaatttggtttttaatttgtttgttcgaggtttcattcgtttatttattgatacataaaatcacccctacaataaagcattaacaatcagcgcattatgtatattattatatggagtaggatattggttaaatgctaataacattgatttgccatattttattgacacaacaatgtctaccttgatttattaccatcttggtttttgcttcatgcggaacaaatggtacggcatgaaggtttcaccgatatactcattattcttgcttattatcgccattgttttcatcgttctatttccctcttacgttgacttaaaatcaaacaattttccattgcatctattgttgctttcaatggtttttattatgaatttttataggtttatcaattcatattttaattcgagaaagctgaaacttattccattggataaaatattgatttggtgtggaattaacagtttggcattattggggctacatatattatttgtagatacattctggatcgtgcgcaataagttacatcttgtaaactacagttggaccatattggaatttgcactcattgttgcaatatgctattttgcgacaaccttaataaaaagatacattccgtctgtattaggaagatcataagcttgctatgaataagacatcgtccgtaaataataaaaaaatattcaagaatacagtggcactttatgcacgtatgttgctgtccatgattgtatcactatatacatcacggatcgtgttaaatgcacttggtgtagatgattatggcatttatggacttgtcggcggtattgttgtcctatttagctttttgaatgtaacgatgagtggagcgacttcacgctttcttacagtcgaacttgccaaaaatgaccctcgacaactccaacaaacattcaatacagcctttatattacatataggaattgcaattatagtcttgtttttggctgaaacggtcggactttggctgttattcgaaaaattgaacattccagatgagagaatgagtgcagctgtttgggtgtatcaattttcaataatttcctcaatggtcagcatcactcaagttccatacaatgcgactcttatttcgcacgaaaaaatggacgtgtatgctattgtggaaattgttggatcactgttgaagttgctgatcgctacacttctacttattacagtatgtgataagctcattttatatggaggacttatgctcttatcttcattcttgattgcaatgacatatcgcatttattgcattaggcattatgacgaatgccggattaattgggaatggaataaggttatcggccgttctctgtttagcttttcaggatggaatctttattccaatatttgctttactactcgtcaacagggaacaaatatgttgcttaatatatttggcagtacagctgttaatgccgcagccggattggcaacaactgtgcaactgatgattgaacaagtatcaaccaatttggtaatggcttcgaggccgcaaattataaagcaatacgcattgaccgatttcaatgccatgatacaattactaaagcaaactacttgtttggcaaatgtgttatatctgttggttgctattccttttatctctgaaatacattatgtaatgaatttatggctcgtggaagttcctccatatacaattgaattctgtattttattgatagtctcaagcttcatatcattgaataataatattatatatattggaatacaagctgtcggacgtttgaaattttattcatttatggcggggacagtatcattatcagtcattccgatactttggttattgtttagtaaaggtatcggcttgacttgggcttttggattgcctatagtgagcacattattgatttatatcgtttgctcatatacactccatcattatgttgaagatttcaaaccgatacgttttttcttcacaacgatggtagtgaatcttttcataagtattccttcttttaccgcaatcctactcatacaacatatcttggttgagtcctttacaagagtgattatcgtggctcttagttcttcaataatattggttgttctgtcctattatgtgctattagacaaagaaaataagaaaaaagtaaaagcattgattttaaacaaattaaaacgatgaataaaaacatacttataattactcctttttttccgccacagactcatgctgcggtatttagggcatttaaacttgtaaaatatcttaaacgtacaggttggaatccgatagtactgacggttaatcgtaattatctatatttagaagatcctgatttgttggacgaagtccaagacgtgcctatttatcaagccaattatatagaaccgacattgcgcggccttagaatgttgcttggaggagaagatacttcactcaaagccattacagccaaagcaaaaactattggtgcacagtcaaaaagcacggatacagtcacctctaacaagcaatctttattcggtaagttttataaatatatactagaccgatggattcaagttcccgaccgctttagattctgggaaagaagtgccgtgaggatgggacgaaaaataattaaagaacatgatatatctatcatatataccacttgcctgccttttacctcaaatagaatcggtatgcgacttaaacatctaaccggagtaaaatgggttgctgatttcagggatcctaccacatacgctaagcgaatgtattctgattattttcctgtttttgccaagcaaaagaaaattgaacaagatacttttaaatacgctgatgctattactggtctgtcgggagcatacctgaatatatttaatgatttatatgagggacgatactcaaataaatcatattttattccaactggagtagatgatgattatttgccttcttttcaaaatagagaaaaagagaattatataatattcgtgggtgaatacctccatgaatataaagataatttcttgaaaatatttgccgaagctgtcaattctaaggaattaaaaggcaagggttgcacccttaaaattgtgggtaataagaatatcaatcaaaaacaaacggaagaatttgtcaatgatttgggaatctgtaacaacgtggaatatatcaatcatgtaccgcagcgtaaattgtatgaattgatagttaatgcaaaagcagcagtacttattcccggacacacggctttatggtggactaatttcgcaaaaatggtcgattatatcgcattacaagtgcctgtattagcaatggtgcccatgactagcgaagcacgaaccgaattgataaaagcaggcataggtatttttatagatactcctcagcaaggtgttactgtcatcaaacaagtatttagcgaaaaatttccaatgacggcaaacaaagaatattgccgccgttacttggcatcgcaacaaacaaaatctttcattgatattttccaaaaaatacaatagagatgcatatagcgtttttaactacagaatatccgatattgggtatgaaatgtggcggaatcggaatttttatcaaacatttgtctcatcttatcgttaagagtgagactggtgtgaaggtatcagttgtgtattggggcaataagtttacagaaactgtgtgggacgatggtatatctgtgatacctataaaccagcctcataagtctccattttcttcttttatcaatagaaggtatctaaataaaaagttaaatctattagtggcaaagattggcatcgacctcgttgaatctatcgactgggagggacctttggctttttgtagtttatctgtaccagtagttacaagattacatggttcaaatgtgtatttcgatcatttgtctggaaacaaaactccatggaacgtacggcttatggaatataatgctttgcgtaattctgatgcctatataggagttagccgacaggctctcgacctgacggataaattattcagtctgtcttcgaataagagaaaatgtgtaatatataatcctgtggatataaacatgccccctctttcatctagtgacatgaacaaaaatacaataacgatactttattgggggacaattgttgagaaaaagggggtacttgatttgcctcttattttcaacaggatatgcgagcaaaacgacaatgtcaaactcattctcatcggacaggatgcagtagtgaatggttcttcgacatgggaaaaatgcaaatctctcttttcaaagcaatcgatcggttgtgtatcgtatttaggtcgcttaccttatgacaagactatgtcatacgctaacagtgccgatatttgcatatttccaagccatgcagaaactttcggtttggtcttactggaggcaatgttactgcggaaggcaattgtttgttccgatatcgattgttttcaagagattataggagacagtaactgtgtttgcaaatgcagggtgaaacgtatcgatgaatttgcagaggctttgcaacggctaatctcgaatcccatttataggtgtgaacaagccgacagggcttatctaaatgcaactgctagattcaacaccaacgagatagtggcacaaaacatcgaattttacaatcgagttataagagatagctccaaacatcatgtagaagaatcctaactcaactgctttattagaaaatttaaacggactttttatttataaaatcacatattcatacgaaggggagttaaggctttttttgtattgccatcttgaagaaagtcaaacatttcagtacaactacgtaaaatatagaaatgcttcattatagtgaaatttctgatagagtataattcctaaacgaagtgattaatttcttaactcttgattcatattattcataaacgccttatgcaaaaagggataagcattattttgcccacacttaatcgggctgattatctggcaagtacagttgattgcttaatagagcaagattttggggagccgtatgaaataattattgtagaccaatcggcagccattgacagtactatgtatagtcgtgcaaaagatagtgatacattgattaagtactatcatgtgactgaatttagagggctacctgaagctcgtaatttcggtgtgcaacacacacaatacgcctacatcctatttctagatgatgatatcgagtgtgactgcaacctgctcaaagagcattacaagttcttgtcacaacctgatatcgcagtagtggcagggggaattacagaaaaatataagaataatcccaaatcgaaaaatgtaggcaagttccatttctatacggcaactccagaacggggattccacattaatcataaagaatatgtagatcatggcggaggtggaaattatagcataaaaaaagacatatttttagaagttggtggtgttgatgaatatttgaattatggagctgctctatatgaagaaaccgaaatatgtttacgagtaaaggaacttggatacaaagttttttttaattatgatgctcatgtatggcacttggctgctgatacaggcggttgcagggttctggatatcaatcgctatattgcttcattagtacataaccgggctttattgattagccgtcatctcaaatggtatcataggccgactgcttacatctatttgttgcgtcttgttgcatcatacgcttttacttaccgcaatcccggactgtttagactttttgcaaaaacttataaagaaggttataaaaaaggaaaactaactcctaaatatactcattatgcaaacatctaacaaacacatttttattgtaacctatgattatccaccaagtaatggtggtattgcaaggctttgttttgaactgaaaaaatatttagagaaaaaaggactgaatgttacagtcatttgtccccaaagtacttctaccgatgcagaggaggataataatgtggtgagattgcatggaagaagaggaatattggagttgcgtacattgaagtatttacgcaaaaaaactgttcccggtgatattgtaattaccgggaattatcatccagagggaatgctgtctctattgtcaaacagagaaacctatatattggcacatggagccgaatatcttgccggaaagagttttttccgacgctgtatttggcctacttatcgacgttttatactaagaaacgcctcttgcgtgattgctaacagtcattatacagagacattagtaaaacattgttctccaaatgctaaaacaatcgctattccgttagcggttgatgcaattcattttcgccctacttgtgaaaaatataaggatggcttgctacacctctgttctatttctcgattggaaaaatttaaaggacatgattttattatccggacgatagcttctttaccggcaaagtataagcaacaagtgcgattgcatctcggaggtaaaggaaaatataagagtgcacttgagcggatggttaccgatttaggattgtcagatattgtatcatttgaaggtttcattgatgataataaactttgcgatttctattcagcctcgcatatattcattctctgtacacgtgaagaagcggataataggaatgtagaaggatacgggcttgtttttgccgaagcgcaagcttgtggaaccgccgttataggtactcgtacaggtggcattcccgatgctgtcgaggagaataatggcggttggttgatacatcaggacgcccacgaagaattggagaatttactcattaagttaatcgacgataaatctcttgctataaatgaaggtcgtaatgcacgtcggcgcatagaagctaaaattacgtgggaacattatgtggaccaaatttgtgatgtcattttatgagtattagtctatatatagccttatattacaacttgttgctgctattagttgtttacatcgctattcaaccggtcagggcagaaacagtaagacagccttatatcaacaaccagatatttagccttgctttactcttgattgtatatgttcatgtaactttccgaccgaccgattatcactactttggagatacttcagcttatgccatggctttccaaaagaaagccttctatggtacggttgctataagagatagagatattggttttgagtatcttacctattggctttcacaactcgtcaatttaaaagggtattggtttgttctttgctcattatatatattgcctgttttctttgctttaaagaaacgattcaaacaacaatatgctgtagcactagtgttgttcgtttgttctttgagtttttggggatacggagtaaatggactgcgtaacggaatagctacatcgttagttatcttctcttttcttgttccaaacaacgatattaaacgaattcctgtttggattatagcatgtcttttccatcaatccgtcatgttgccaattggctgtttcttgctgacccgactttcaaataatcccaaacactacttatacttatggggaacgtttttcctgcttatgcttgttgcacgtgattctttctccactttgttgacaaacattccttggtttgaacaggataaaaggatgtctgaatatttgaatatgtcttataaaggcatggagcaaatgttctctaatattggatttcgctgggacttcattatttatagtttgatacccattatcgcaggagtgaaatatatctatacatattgctacgaagacaaattgtttatccgtttatttaatacttatatagcaagtaatgcgttctggctattgaccattcatgtaccgtataataacagatttgcttatctatcttggtttctttatcctatagtattgatatatcccttgctaaaagataacttaataaataaccagggagaacgaataaaatggattattctatgttattatatgttcacttatgtaatgtggataaaataaaatacaaaacaatagaaaaagatttttatgaaagatttagttactgtatttacaccggtatataataggaagaatttaattggaaatctatatcagagtttgttgtctcaaacctataaaaattttgaatggattattgttgacgatgggagcactgatgatattgatgaaattataaaatcttatcaaaatgaagatcgtatattaattcgtttcatcaaacaagagaatggtggaaaacatagagcaatcaacaatggcgtattacatgcaaaaggagaattattttatattgtagatagtgatgactatttaacaaaagactctatagaacgaatagtttttcattatcaatatataaagaataatgataaatttgctggagtttgtggtatgaaatgctttccagatggttctcgtatagggaaagaggttacatggaaaattttaaaagattcttggattaactattggattataaaaaatataaaaggggatgttgcgtttgtttttaaaacatcagtcctgagaaattatttatttgacgatatacccggagaaaaattttgtgcagaaagtttggttctaaaccgtattggaaaaaattaccttatgttattttttaatgaaaaaatatacatcgcagagtatttatcagacggtttatctgtttcatcaatcaaaaacagaatgaattcacctaattatgccatgagaatttattcagaaatggcatcactagatattccatatttaaaaaaaataaaagctcatataaattactggcgttttgctccttgctctaaattgaaaatgaaaaataaaataaaacaaataggaatttctagttatattatttttatgcctattggctatttgtttcatatgaaagataaaaaaaacaattatatagatattagacatttaaacggattaaaccattaattaaggtattcgttatagtagattcatatcttcctaggaaacttaataattttttatttgtaagtttaagaggtattggaggaaaagttggtattgtgattagatacatattggtgaaaaatctagcaaaaaaatgcggtgataatgttgtaattaaagaaaatgtatatatatctaacatagagaaactagaactgggagataatatcagtattcatccgatgtgttattttgaatgtagcggaggattgatgatcggaaataatgtgtctattgcccattcaagttcaatactaacaagtactcacacttattctgattttaatttacctattaaatataatgaaatcctaaaaaaaacggtagttatccatgatgatgtatggattggttgtggagtgaggattttatgtggagttcacattgatacaagatgtataataggcgcaaatagtttggttaataaaagtgttgactcattctctatttatgggggagttcctgcaaaaaaaataaaatcttttcaatgaaaaaaaagaaattattcaaaataacaaattcagcttattttcaagtccggcaacttcaaggtcaattgaattatttttccgcatatttcgatgtcattgccgttgcccctaaaggagaaggttgggaggaattacagaagcaacaggcacgttgtattccggtaaaaatgtcaagagccataaatccgattttcgatttaataactcttttccaattggtaaaactttttatcaaagagaagccgactattgttcactcgcacacccccaaagctggtcttttgggtatgttagcagcatggatagcacgtgtgccgatccgtatgcacacggtaacaggcttcccattgacgacggctacgggcataaaaaaacaaattcttcgttttacggaacggttaacttacgcttgtgccacaaatgtatatcccaattcacaaaagatgtgtgatattatttgttcaatggggatcggcaatcctaaaaaaatgcttgttatcggtaatggtggttcaaatggaattgatacggcattctattcgcgaaatgctacacaagatattaagatttcaactttcgatttcacgtttggttttgtaggtcgtatattttatgagaaaggaatcaatgaattagtagcttcttttattcgattacagaaagattatcctaacataggattacgtttaatcggctttatggaagaaaacctttatccggttgatgattgggtaaaacaagagattagcacaaattctcacattgagtttgtcggctttcaacaagatgttcgtccctatctaatggggtgtgaggcttttgtttttccctcctatcgtgaaggtttccctaatgttgtcatgcaagctggggccttggaattaccacaaatcgttacagatatcaatggttgtaatgaaataattgttcaaaacaaaaatggaataattgttccaccacaagacgaacacgcattgtataaagccatgaaatattttttggataatcctaatgaggtaaaaagaatggcaaagaatgcaagggcaatgattacatcacgttacgaacgcaataaattttggaaattgatgcttgaagaatactatcggcaaattaaaaatcgaattaaataacatctatgcaaatcatactgttatccggcggttctggtaaacgcctatggccgctttccaataatacacggtcaaaacaatttatcaaactgttgactgcgcccgatggctcgaaagagtcgatggtgcagcgggtggtacggcaattacgagaaaccggcatctgtgattcgattactgtggcaacaagccagtcacaacgggatatcatcatcaaccagcttggagaagagattcctgtagttacggaaccggagcgtcgcgatacattcccggctatcgctctcgcaagctcgtatttggcctacaaacgaaaatgttccaccgatgagattataatcgtcatgccttgcgacccttataccgaaacaggttattttgaaacgattcgcaggatagcggatgcagtgaaaaacaatgtagccgaactagtattgatgggaattaaccccacatatccgtcagcaaaatacggatatgtagtgccagtcaatgatgtacagaacaaaggaatatttcaagtatcacgctttacggaaaagccagatatgataactgccgagaaacttatttcagagggtgctttctggaacggaggcgtattcgcttttcggttggggtatatgacagatattgtaacccgacacatcaaaaccgacactttttcagaaattcgttctcgctatggggaatttccgaaaatcagttttgactacgaagtcgctgaaaaagcgcagtcggtagccgtcgtaccttttgccggagagtggaaagaccttggtacatggaatacgttgactgatgaactatcggaacacaccatgggcaatgttgtcatggatgaagaatccgaaaatacccacgtcatcaacgaacttggactgccaatcatgtgcattggcacacggaatctagttatcgcagcatcaaatgatggaatcctaatttcggacaaagataaaagcgagaacatcaaaacttacgctgactgcctacaacatcggccaatgttcgaagaacgtcgctggggtgaatacaaagttgtcgataccgccgagttttccgacggttacaaatcacttaccaagcaactgaaaatcaaatccggtaagagtatcagctatcaggtacaccgccatcgcgatgaagtctggacgtttatcgacggcgagggagaactggtactcgatgatatcaggtcggttatcagcagaggcgatacgattacaatcaagaaaggtgttaaacatgcagtcagggctatctctgaattgacgttcatcgaggtgcagtccggaaatctacttgcagaagaagacattgaacaatttgactataaatggtaaaatccttcgttaaaacctctgacaaaagaatgaagttggtttacaagaaagttatcgaacctcaattaggcaacctgatatccatattgaaaaagaaatgataatctatagcattgattattatcaacaagatcaagattgtactcaatgtggaaaacattcggaatgtatttgccggtaaaatgataaaatatcactatccatatgtaagtaagtatatataccggacacaggatcttgcgaaagtagcttcgttttcagattctaaaccgcagaaacagcattacgcaaaaattaatgggttggaaaaacttattataaatactggtaatgaaccttttcattgatttttctaatgaaaaagaccatccttcaatacatgaccgatatctatcaggaagatattcccaaacatatccttcaagaaaacaagatacgcctgaattcttttttcctggaacaggaatccgtacagaagaaagggactcagtttatattcagatatgcattctactccgttgagaaaccccgaaagatcacgaagcagcatctattgaaagaatatgcaggggtgcctttggaaaaaaggagcgtacaaccggaacaaatacccgatatgaagcaatatagtgatataatactgtatggagatgccagctctcctgaagcacagcaacagctggcggaatacctccaacaacataattcattaaaagtccagttgtctttttttgacaagagaaatgattccactagcaaggatgaacaagccatcgcatatgcggaactacagaaggcgctatttttttgccaaagaaaaaagatacctctcctgttcgtttccttaaaagggatgatagacgacatccgttttctcaatctgctggaggagagccatgtcgatttcagatgtatcgattttccatggttctgcaaggagaatctgcctctgataaaggcagttgtgctatatgaaaagttggaaataagaataaatgtataagatatcaagcttacagattggacttcaatgttgcagcattgaggtttatgagaaacaattctaaatatatttctgtttggcgaaatcttattctaaaaggaactctaaataaaagaatccaccttcagatatctttcttcacttatcctcaaagtatataatccaaacataaatatcagacctattttccctataactgagtaataaaaagattattccccaacaccgtaaacaaagaaataacagaagcactttaaaatggtgtatctaactcacttttttaaggataatatccctgttacagttatctgtagcaggtgatcctttcaaattgggcattagatgcacccttttccttattccaacaaatgcgcctcttgtaacctcaccaattcccaatacatcttcaaaaacatctccagatacaccttcagactcgggaaatagacgaaagacttccagcaaaagaaaggcacatgaatggccgttcattcggaacctccatttctggatagcgtttctttgtccatccaaaataatctctatcgggacagaacaataaacaaaagcataaatatcaggcaaaattgtcccgataaaagaattataacatgactattgaagatgaaatcctccaatacctgcactatcatcctctatcaaacagggttgagataacgcttgggataaccaatcctcccagtggcaggattgtaaaaagactactggccgatgccgtaaccaaaggaatgatagaagtactctaacaatagtagtgccactattttataagcagcactgcaattgttccttaccccagcaaatgcacctcctgtaacctcaccaaccccaaatacatcttcaagaacacctcctgatacaccttcagatccgggaaatagacgaaagacttccgggcaaaagagaggcacgtgaatggccgttcattcggaacctccatttccggatagcgtttcttcgcctggtcaaccgccatcttgttcagtgaagccacgaagttagcctggcgtatcggattccatttcggggtttcaagaatcaccatcccatctttccgctcaggaataaccaaatattcatcctgcacgttacggacgtaatagcacacaaaagacaaggcctcatagacattatcccctacatgaataccgataacccgttcttcaaccggtgtaccggcaaagcattccgcaatctgtttcatggcatacccatgcaacaaggcagcatcagaagccaacagataagccggtgcggtacgctctcctcccttatcgatggcagcaaagacagaaggactccaacagagatggatgagctttcctttttctttctcacgaagggaagcgacacataaacggttatcaaagaccaaacgggcttctttcgtttccggatggaactggaacacgttccgtaccctgtccggcttatggatatccatcatcagatagccctgccaaccggacacgtgctttgtcttcaagacggtttcgctttcctccacatcgaaaagataagacaagagcttttctcgcttacaacatacgaagagagaaagctcgtcctgttctttcatctgctgcatatccaaggaaagaacaaaagccaattgccaaggagtaagctcggaaaagccatgtaattcaatacaagacaacgcatccttctccggtgagtaaacgacatatccccggccacctatctcatatctcaacatgaaatccccctgttcagtgggatgataattctgtaaaacggtctgataattcataaagcaaatatattaagttagtattcatcataatgagaaatcgggaccactcttgcgtttccgtttctttttggacggtatgagatcatcctcttgcgacttcttcccgctgccggtaatgtcaagttccggaatggccataactcccccaccctgcatatagaaagcctcacgatccacccgctcacggaactcccctaccctatcgatatgtggcgagagaccgacagccacaccatcgaaatgcttctggatattctgataagtgagcttacgggaaagatccgcacctttaaagacatgagcattttccacgttttccatataaaaggaaatcccgtatgcgcctttgctgtttacatgttccgtcacacggatcgattcttccgccaaccttttcttaaaatcctcatagcctaaagaagcgttcaatgccttaaacacatggtcatagagataatgcttctgttcatcggcgctcatgccccggccatcaaaacgaatattaccaaaacgatatttctgaggaagtgaaacgtccttcaggtaaaagcctgaatccttgatgccatagacataataggatttgtccttcttggtgaccagacgcatatacaatccttcttgttccaggttccttcggaaatcggatgtactttcggaaaaagagtagatgcggtcaagctgttgtaacagttcatccttgaacaaggggttgaaaaaacctcctttttccagcaatgcgaaaaggttgtcatagctttcatcccccaataggacacgccattcttcattggccaattttatttcttgcaagggtttattcaaagaccggtatgtatcggattgttccaggacagccgataccttatccttgtaattataactacgcatggctttcttcaaggccgcatcgaaataatagttacggtattgcgcctctcccaacgtggttctcttgcctccttccctttccaaaggcaacagaccgtacttctgctccagttcccttgagatcttttcggaacggctgtaattatttccggaaggaatgcttttgccttcttcatcaattgtggtcagcagcacatgcacatggctgtgtgccttgtcggtatttaggacaacggcataacaggactttccgtaccccatcctctcgatatattccccggcaagagaaagccactgttcatcggaaaggctttctcccggatagaggctcagaataaattccgcataaggtagtttcacccggtcattcaactgggagataagtttcatgtaggctggcatggcggccagttcgtcaccagtggaggtgtaaagcacttttccgtttccttccttgaccttggaaagctggtattcaattttccggctcatggacaggtgggatgagaaagaaggttgtatctcggctatcataacaatttccggttaatggtttctacatccgaaaggtattggttaatccgatccaatgaatacaatatattttcatcggacggaagcgtattgatatgtttggcaagctggttgatattggctcctattttacgaagttcatatatcatttgcacatcggttttcgatatgcttctgcctttcaaggcagactctctgataaaggaagaaagggattttccctcttcctttgaacgttgaagaagctgttctttctcggcttccgtcaagcggatctttatacttatatctcgattctctttcatatatacagagtatgtgagtgtaacgaacattggtcggcagctcggctgtcgcaaggttttttgtacccacaaaaacataccttgcattagcaaagatatacaataatactcagctgtgaaacaaaaccagacaaaagtcttgatttcttaatccagattaaccgctcactttgttacaaagtaactacgcacattgtaacaggcgaacggaaagccattagttacaaaatacataattactaattatattattacaaagtatgaacatacatacttaattataagattaagtatgtacatatttatatttatatttatatatgtaattacttatacaattaagtaaaaaagtgtataataaattaattataaaagtatgcaattatttaatttattatttatatatttgcgcacatacttaaaaacgtacattatgggacaaatattaccaggagtagtcgtagcttttgagaatcccaagggcggggtagggaagtctacgctgacagctttgtttgcaggttatattcattcgcagtcaaacgaagaggggggcttatccattgccgtggtggatatcgacgacatgcagaacactatcggaaaattacgtgaggacgaagccgaggacggaatcatgaaaaaggaagaagaatatgaggttatcaatatctcttcctcagagttcatcaaccaactggatttccttcaggacaattacgacattatacttgtcgattttccgggtaacctgaaacaaaacggtgtagttgaaacgctgcacttcgttgacgtgatcatcattcccttcgaaccgaaccagaccgatttaagacctacattgaccttttactataacatctatgaagggattatcgaaagccgtcgaaagattggtaaaaagactaccgtgcgtggtgttatgaaccgtgttcttccgaatgtgctggagttcaaagaaattttgaaaaataaaaaaaccttgcctttcgagttgatgcaaaactacatcaaggattcaagggttgactatcaacgcaatttaagtacgctgagtaaagcgtaccatcatccctgtgatgctttctgtgaagaggtattggaattaatctgtaaccatataggagaataaagctatggcaaccaacaaagaaaggacatcatcagccgccatgagaaaactcttgctgcaaagcgccagtaagaaagagcaggaaatccagcagatcggaagtgttgcggaaagcactatcccccaacctgcgattgagcaccccatccatgaagaggtgaaagaatcggctccagtcaaagaaaccgtccaagaacctcagccggaacaaatggaaaagccggaatccaaaccttccgtgcagtcttctccaaaaacagaagaaagcaaagtctgcggaaaaaaattctcggaatatctggaagagcgaaaattaaagaacaccgaagtaatccggatatccagcgaaacccacagaaagctgaagcagattgctatggccactggattaggaatgcacaacatcgcaaacaacattcttgaagacatattgaccagccataacaaggagattcaagcgatactgaagaagtatatgagcatctgattctactttcggaaaaatatatacgcctgttcgactgcatccgtcgggcaggcgttatttttgcacaccgttttagtgaaggccggcattgaaccgggacacttttacacaactgcggaaaaatccctttgcctattatcctggacaatatgttaaagaattcaaacctctacttgtttccacctcaaaattttttccgaaagtaagaatacggtaacaaaatcatttcttcgttttatttaggtttttagggatttaagtatttgtgggacacttttacacaactaataagggaggttttccgtataatcaactatattattgcaagttagcacttactggcatcttctcgtaaccgggacacttctgcacaactaaccgactattcgggacacttctgcacaactgaacaggaaagtcgggatacttttacacaactagaatctgcattcgggacacttttacacaactaaatcaggaatccgggacacttctgcacaactaaaccggccattcgggacacttttacacaactgggggatcggaaacagccgtagtcgggacacttttacacaactaaatcaagaaacagcacgaaaaaaatgctttggaatcttcatttatagggagttagattcactatctccgtaaaaaaacgtatctttgcatcagtaaacaacaagtgtccgcctatgaaggaaagtaatacacaaaaagagttgagcagagtccccaggactctcagcgagtcttccaacacgaaagtattggaagttctatttgatgcaggcggcactgtcatgtctgacattatcatttacgtggcatcttcacaaatgaaagatctgttcggcgactgctggttctccatcaacgatttttgtgaggtcatggggtatgaacgaaccaagttgcaacgaaaactgaccgagaagcagcttgatttcctgttcagcaaccaacgtccggtatatatcaccgaacagaacggccaaaagatagagcatccgatagagaacacctttgaagcggcgttataccgtttagggacatccaacctcagtgtagcatacgccatgaacggcaagacgcaatataagttcattcaaatactggaccgctttgagataaaggataacttcggcacgaaaaagcgcaccaagcggaattacaacgtgcatctgagcaaagatctgatgaatactttgcttaccgaatacaatctgctggaactgaaagactaccgtaacctgcccaaccgcaaaggctaccgcaagttttatctgaacctggcgaaaatgatttacctgatcaagtataagattgaccaaggacaagcaccttatttcaccgttacggttgaccaacttgccaaggaatttgatgtaacggtaaaggacaaccatgaccggaagaagaaggtgaccagcatcttaaacggtatcaacaaaaagctggagagaaccaaattccaataccagtacatcaaaggaaaaggggagaagtggccctacaccgtacagtttttctttgaccaggaaacattggaatatttcgacgaaaagataaaggcgatactgacctcgcaatatcacgatgcgcttaaatcatgcttcttgttaaacaagaaaggcattcccgtgagcagacattatcaatataaggatttctttaaattgggaaccggcgaatattatcatgaatttaccgcatggctttattctgaagaggacaaggagattaaggagaacatctaccgggatatctatataaaggtagtaggcattcgtccagaagaccttgccgtcaacttaaatccctaaaagttggaacaaaaaccataaaatagtatctttgcagcggattgtcagaaaattggcagcccgctttttacatacgtccgtctgtctaacaaaagagtggcatctatcgttaaggaattaacaacaacaggcgcatgcctgtaccagtatgaaactggtacggggcgtgcctttgttgttggaacgccacgtccatgttagagggtacgtttccgtacccttatataaacataaaacaaattcaatggttcaaacaattgccaccctgatagatgagacgctcatggtaatgggcgcccatcttcacgtgcggatgacagacgaagaaaaggcgtatcttgatgctcatttcgagcttatccatatcaaaaagggagaacacctcgtcaccaggggcgaggaagtatgctacctctattatctggaatccggcatcgtccagttatggtttccggacaaagagaatagagagatttcagcacggtttatccaagccaaagagttcatcaattttttcctttcacatgaagaacaccatgcccactacaatatcaaggcattggagccatgcaagatctggagattgcccaaaaaagatcttcatcagctatatgagttatccatcaatttcaacaagctggccagaatacatttggtaagatccatcaaccgcaaaataataagggaagaggagttttacacactggatgccgaagcgcattacaaagcgcttttggccaatgaaaaatggctgttacgttcaatacccttaaaagacatagcaagttatatcggcatcacgccacaagcattgagcaacatccgaaagcgcatataaaccaaaccctataagccgggcaggacagttttacacaactaatcctatccggcttttttctgtagaattattccacacctgccggtttacggcacatgtattttttaatgcacattaaataaacacgaaaggccctttaaaagcccttcataaaatttgtcctcccgtatataatctatatgtttggagcgaaaacaacgcgataagcaccttgattcggttctgccgacaggaatccgcgtaaattggaaacaccgtatgagacaaatagaaaaatatataacattaataacctaaagagtaattcccatggaacacatcagactgactgctatcagccttagcctgctgttatgcaccgtaagcgcttttgcgcaacgccattatgagaacatcccggcacttgaattgaactacggcactaacctgttcggcaatgcaggcaactattacaacctgtccttttccagatacatcaaccggacaagctattggaaagccgggtttagctattttgagaaaccttacgaatatacagccaacctaccgcaagtctctaccttgaacccggaagaaacgattcccgaaacgatacatgacaagggtaaggacttttttgtggacggcggttattacagaaccctggcctgcaacctgaaatccgtttactggggcatcggcctgggaggattcatcggtacagaatacgtccgccaccccgataaggaatacaacttcatcatcggcccgaaactggaaacggaactggaagtattcatcctgccccgaacggcattgcttgcccgcatacaacaacattggaatcccctatccattgacaagtggaacactgtctggaacgtaggaataaagatactgctctactaaccgacaaatcatatcaccatgcttattatcatattgttagccgatacaaatgtatccggcctgatctccttataccgtgaaataggcgccatgctgataggggtaggctttctatgtgccggactagcggtacttaaaaagctgataagcaaccacgagcgcaccaaagaggccatcatcacctatatcacggcattggtcacttggctcattatctggcaactcttatgaacgtagtggatttgatactggttgccatactcgcctgtgtcacgcttcacttttactttcggaaaaagaagaaagcactttcttccggaaaggagaaagagaagccgataagggaggcggtgcgcaaggaagggcaggagagagcctgtccggtcatctgcgtggtatttcagcctgagctggaagaagaggaattggctgccgagatagccgatatgtacctgcatggaagagcctactactactcaggcaaaccactgccggaacagccgaaagaagagcccatatccatcaagtataaggatgtgcaatgggagagactgaaaacgattcatgtttaattaaaaaataggaacaaaatgaaagcaatcgaaaatgtaagagaaaaagcgaaccaagtcattaaccgctatggaaaggttatcttcacctttctcatattcttcacgctgttgggaacggcacaagtggcggaggcacaaagcggcctgaagattaacagcctatccgaagtgacagacaaagccaaagagggtgcggacaccattctggacgtagccaaatacattttggcggcggtactcggcatcgctctggtctttgtcatctattcgcttgccacgaacaatccccatgccaaggaatacctgctcggctggatcatcgccgtggtagtcatcatggtagccttcctgattatctaaaaacgaagagccatgagaaccatgcgtaaaatcaacaagccgatcaagttcttcggtctgtcatcgggacagttcgccatcttcatgctgctgacggccatcatcatcatcgtgagcatattcaagcagctgcacccgatactcatcatcggaatcatttccgccattctgtttctatccggtctgctgttccaaaccttgaaaaaggaacacaaggccggtaacccggactacctgaccggcctccggatcaagaacgccaccccccggcagataacggacaaacggcagattttcaaattcatcctaaaacagcaaccatgataggaatcatcatactcatatccctgctaatctgtgcgctgtgcctgctgattgctctgctgtatatccggcagacagagatagaggtgaaggacaaatccgtggatctggaaagtgtcttgcctatccagaccatcacggagaacgccgtcatcaacgggaacggtgacatcaccgtcggctaccggctgcttctgcccgaagtgttcaccttgtcggaaagcgaggcgcaatacatccatgagcggttggaggctcttttgaagctgcttccggcaggcacggtcatccatcagcagaatttctactatacggggcgataccatcatgcagaatactcttccaatgccctgatagcggagaacaaccgtcatttcaacggcaaggagatactgaacagttacaccaacctgtatgtgacgttcacgaacggcagccgaaacggtaagatacgcaaaagcgcatcgggcacctcgctgatgcgaaagctgcactacccgttcaagcaaccttataaggaatatcagcaacggctgacagaaatggaagcctttctgatgaactttgagaacggtttgtcgtccatccagcagtttgagatacgcaagatggatgatacggaactgaacaacgccatctacgactacgtcaacctctcttacgagacaccggaaaacgatgccacgcagaagagcgtcaaccctatggctgtcagtgaaagcggaagcatgaaaatagggcagcagcacgtttccatcctttcgctgaccaacgaaggcgagcatcttcaggaactggccgtgccgcacaccggcaagtcgaaggcatacgggggaaacatagagataccggacagcatacggagcaaatgctcgatgctgtaccccgtaggacttggcctgccgttcaaccacatcgtaaacatcgtgatagagataaccgatccagatgccaccgtaacggccatcggtgcggagaaagacgcgctgaactacatcaccaacttctaccctccggcggcagagaagcaacgcgagcaggcagccttctgcgatgagattacccagttcgactaccagaccgcctataccgccttcaatgtcgtgctgaacgatacagaccgcacctcgctcatgcggaaaaccgcactggtacagcaaggcttcagctttatgaaccaaagttcgtgctatgtggagaacgccgagctgtgcaacctgttcttctgcaacatacccggcaatgccagggccaattaccggggcttcgtcaacacgaccaagcaggccatctgctatctgcaaaaagaggggatgtacctttcggacgagaaagggcatatctaccatgaccgtttcggtactcccgccaagataaacctctgggattatccggcgctgaacaacaagaaccgcatcgttatcggcccgtccggttccggtaaatctttctggctgaacaattacatcctgcaaagctatgagctgggccgggatgtgatgatcattgacatcggcggctcttaccgctcgatgatagccttgaaccggggcaaatacttcgactctaccgagcagaagaaatttgcgttcaaccccttcttgtgtgaccgtgacaagaacggcaaatacctgtacatcgacaccacggatgccgagtctgccgatgaccagataaagaccatcgtcgccattatcagctacatttggaaggtacgtgaacccatgctgcctgccgaaaacgccattctcaggaaatccgtcatcggattttacgactatgtgaacaattcttcaataggagagaagcatgagcgtatcttcccgacgctgataacttaccgggcttatctgaaggaagtgttcagcaaacggatgaccgagtttgagaaacagaaattcgagatagaggagctgttgcttttactggaaccctatacggacggagagctgtcattcctgctgaacgctaccgagaacgtggatatcgtgcatgaccggctgatagccttcgatatggaagatgcctctaagaaagagtactttccactcgttgccatcatcaccctgcaaatgatcgtggataaaatcaagaaacgccaggggtttgccaaagagctaatcatcgacgaagcactcgacttcctgcaagacgagaaattcggagacttcatcgcctacctgtaccgaaccttccgtaaaaaggagggaagcatcacgctggccgcacagaacatcctgtttttgaaaaacatgccgtccagtatcaaggactccatcatcatcaactgcgcgaccaagattatcctcgaccattcagaacaccggcagaacctgccggaagtgaaagccgtgctttccatcacggacgaagaggcctatatgatcgagtcgttgcagcgcacggaacgctggagagagtttttcatcaagatgtcgaacgatgccttcatcttccgcaacgaggtgtccgacttcgccgccgtagccttcgattcgcgccaggcgacagtagtacgactgaagcagttgttcaacgaaagcggctcgacctatacggccatcaaccgctatctggaggaaaggaggaaaaagtatggatgacgccacccaagggctgaccgcccttctaggctggtcaaccgacttcaacggcagcgcatacaatcttgccggaagcattgccgccgcacttttgggcgttgcgctcattttcgtggtatgggcactcgccacgaaaaaggaaaatgccaagagctatctgacagcctggctggtatgtgtcatattcaccctattattcatcaccaacaaataaccgtcatgaaaagaatcattctcatactcggacttgccgcctcgatagggctgatgggaaccggcagtgttcatgcccagttcgtcgtgcatgatcccggccacaccctgctgaactcaacggaatggatcgccaatgtcaagaaatgggttacacaaatcaatgaaatgatcgatgcccaggaactgcggctcggcctgcaaaagatcgaccagttgaaggaactcaaatcattgaaagagcttgccgacctgctggacgacgtagcctgcctgagcagcgactacagcttttacctgaacgtaggatcgaattaccactgcctgaaatttctcaactttcagcgtgtgaccgtcaatctgagcctgagtaccgacctgctgttcaaggtggccaccgtgaccagttacttctcgatgaactcggaagggcgcatgtcctttatcgagcaggtgaaggaatcggtggaaaaagccgccgaagagatgcgtgagtttaacgaatccgtgcgttccacggtcatttacaaatccatgaaggggcataaccggaagacctattaccagggacggttggccgctttcacacgacacaccaattaaagcgttatgaatcaagataattttctctggggacttcagatcacggacggtctgacgatggaactcgtttcgcaaatgacagtcatcgccttcggtgttggtgtcatctgctttatctgcaacctagcatacaactatctctatcacggagccagccagctgttaagcccgaatgaggacaaatttcccgacatgatggaaatcgcccgttgcctggtactgttcttctgcctaagcatatacacccccatcgcccaaaccatcgtaggcacgatggaagtaatcaacgaagccacctcgctgacctccgagcgtgcgcaggaatttgcccagttcatggcacaatcagccatcgaacaaggagagatgattgccgaatacgacaaacacagcctccagtcggaggtagcagccggagaagacagcaccggcgccatgcagcacgaactggataaaaagatggaagaggacgaaatgaccggtgtacgctccagcgtggagaagattgtgcagctgctcaaccccgccaacctcgccacccttgtgcttcatggcatttccgccctattggtaggaatcatacaagtagtcatcttgggtatcggcgtggtcattgtcaagctactggtcattctcggcccgtttgtctttgccgtaagcatgttgccggtctttcagaaacagttgagtatctggttcggtacgctctgctccgcctgtatggtattcaccgtcatcaatattctgaaccaaatcatatggcagaccttcaaggccatctatacggaaagtgccgacatggtggacgcagctacgcagcagatacaatatttaggaatggatctcgccctgattggtgcttattgcagctgtttctggctatcctccaaaatcgtaggacacagcgatgccgggaaaatcatttcgaaaaccgtgtcaatcgtcaccacggcggccaccatcgccctgatgggaggcgcagcggcaggcggcaagctgaccaacgtaggcggtgccgcctctatcggggcaagtttcataaacgacaacaataaaaaatagaactatgaatctgatgaaattcaaaggagcagatgatgcggtcaagctgactatccggctttcagccgggtactgcatcattctgactatcgcttttgccagcagtatcatcttccttatcaacaaaatagaaaaagcatacggccaggctctcgtcatcgacaggcagggagaagtctatgaggcaagcagcctgtctgccagcgatatgcggcaatacgaatacatgaaccatgtaaagaccttcgtaacccactggtatgcctttgacgagagcagctacgagaagaacatttcgcttgcgctcaacctcataggcaacaaggggaaggagctgttgaacgagtacaacgatgtgaatatgctgaactcactcatacaaaagaatatccgttacggggtacgcatcaaggatgtagagattaacacacaaacgatacccgtttccggaaagataatcttcacgcagaccgggtaccgggcacggggaagcatctcacgtaatatcgaagcggagttcaccatctatgatatgctgtcccgcagcgaggaaaatgcgcacggagccaagatagaagattggattgtccgctattccgaacccgtggaaagcaacggcaccaacacatcgcaggcagcttctccgggcaagaatgaaaaccagtcagaaacctctaaaccaaccgaccatggaaccgaataaacttatcaaagacaagaacaagctgttgatggccatcccggtaatcctgggcatcctcttcctttatgtattcttcatccgtgaggacgggaacgtgccgtcagggagtgacagacaggccgcctcgcaagcctttttggaaccacagtcggaaatggccgacaaggtgaacgacaagatggaagcctataagcaggacaaactggaagagcaggagaaggcacgcatcctgaaagagtctcaggtcaaaggatctgatttttacttcgagctgcaaaaccagcaggagcggtatgaccgtgccacactggagcgcatccgccgtatgcagaacgatccgtacagcgaagtcatggcagaatacggaggtggccggaacggacgcttctctcatcagctggaaagccaactggacggactggaggacgagcaggcgctcaacgagattatccgggaagccaagaagaactcacgcatccgcaaggaactggaagaatccgacaaataccgcaagcgcatgtatgaacggattgtcaattatgaccaagagggaaaaacggagaaagccgctgccaacccttccggccatccatccgccgacagcctgatgcaaaaaggcccgatctaccatgccgaaaacggcaagcgggtacgccgccaaccgacctccgcaccgggaaacagcaacctcttcagggcttgcatccacggcgaccagaccgtagtcacgggcagtacggtacggatgcggttgcttcaggacgtaaccctatccggcatgaagataccggccaacacgctgttttacggtatcgccactttgggagccaaccgcctcgatgtggtagtcagcaacctgaaggtaggagacaacctcaatcccgtatcggtggttgtcttcgacaatgatgccatggaaggtttgaacctgcccaataacctgaaagccagtgcagccaagcgtatggaacaaggtcttgtacagaacattgacatgccgctctcttccatcggcacgatggccagcgaagtgaccagcgtagtcaacgccaccacccaggtagccaagcaaatcttgaacatgagcctctcacaagtgaaggtacatctcaagtccaactacgaaatgtatatccaagaagagagtcaggaatcgaagttgcgtaggcaagccgtgcaagcggagttacagaagctctatgagcaaatggaacaagagaaaacgaacaagaaaaatcatccccttcaaacattgatagacaaattatgatagacattctcaattacctgcttgcgctgtcagcggtctttttcggctatcggatctacgtatcacgccggaacggacgagcctttaaagaaatccgtccgctgaccgtttctttcggcattaccctgcttcttctatggggcattaccgtattcaccgcctttttttcaagaaccgtttaacatatcgacaacatgaagaaatatatttatctactgttttactgctttgtgtgcagtctgccgctcttcgctcaggaaaacggcactccccggaaacaagccatcagccaaaaagacatctttatctctttcgactgtgtgaaacacctggtatttcctgtgcaagtatctgatatcgccatcggcgaacaggagcttgtcatggccagccgggtagaagaggcgccccatatcgtcaggctctcggcgcaagcggaaggattcaccgaagagaccaacctgaccgtagtctgcatcgacggaagcgtttacacctatcacatccgctaccttcccgaaggcggcacggattcgtacccgaacatttacgaggacaacgggaaatggcagcaccatgactatcaggcagaagtcagcgacctccatctggccgagttcttctttccggaggacatcgcttacggaacgcccggcaacgaggtgtccttcactctggccgcctacaacaaccagttgaaagtatcaaccgccaaagatgccgtggcatattccaacctgtttgtggtggataaggccatgaacacttaccacatcaccatcaaacggggcaatacctccgtattcacctacaattttgatgaccagcgcaaatataccgcccatgtggatgtgaacagcgaggaaatggaaagatgcatccaagagctgcgcaccaagaagcgcaacatctacagcctgggggtcatcgagaacaagtttgagttgtcaatggccaatctgtatgtgcatgaggacttcatgtttttcatctttgacctgaaaaacaaatcatacatcgactacgacatcgagtttgtcaaatgtttccagcgtgaccaaaagaagagcaagaacgccatccagcaagaaacgaccatcgaacctatctatcagaaagattttgatacgaaaatcaagggcaagagccggaaccggctgatacttggtttcgacaaattcacgatacccgatgataaggtattcgagatcgagatttacgagcgaaacggcgggcggcacatcaagctggccgtgttgaacgaatacatcctttccgcagaacccttatacaagccacagccatgaaactgagagaagcattagacacctatatgttcgacaacgtgggacagttcggcggcatcgccgaatcactgggctatcagaccgaataccgggacggatatttccggttccgcaaagacggggaagagctgagcatgagcgtaagcgaaatcagggaaaaagccggagcaaagtacgatgaaagccttcgtgaccaatcaaaagaacgtgtatccgccctttttgacaaggaacgtgccaatgatcctaaatatgtcgccgagctggagaaggatggcatcagcatcaagcggtgggagaacctaaagggacatgacaaggacggctttaccgtcatcgaccatcgcctgaaggtatgctacaccggacagtcgctctatgaatacgcctacaagcaagggaacatcctcgacgggaaaggcaccaagctggaaaagggtgtcatgtctgatttgatggagatacacggcaaaccggggaagctccgtttcaacgatgacggaatctccgtattctaccgcaaagaggcgttggttatcccggacaaggtgctgggaaagaagttgggcaagaaagagaaagaacagctgcttgccggtgacatcgtacccatcaccgtaaataagaaggacatcctgctgcaagttgaccgggatctgaactccgtcatcctgcgcaccaaccaggaaatcaagattcccgacatcatcgggcagaccagcgaatatggcggctacaagttaaccaaagccgacaaatacctgctcgccaacggccatgcactggagaacaagctgctgcacagtccggaaggctacttcattgccgacatccaactgacggatgacaggaaaggagtcatgatacagaacatacagagtatcactcccggcaaggcacaagagctgatcaaggccatgacccccaaactggaagcccatgcggccaacatagaagctgcaaaagagcaaaaacacgaagaggggcgcaatatggaagccgagtttaaggaagcggtgggcaaacatgactttgaaaaaatcgggaagctcaaagaggaaggatataaacccagtgaagagtttatcaaaggaatcggtaaggaacacggtctggatgaaaggcaaacccatgaagtcatccagctgttcggcaccaagccggaagaacagggcgaacatgaaaggcaggccgcacgtctgttggatgccgcacagaccgacaactttcatgtcatccaagagatacagaaagaagggtaccggctcactcaagaagaccttacccggatgcgtgaaacgggtgtgcaagccaacacactgatagccgtacaaaagattttcgggatggaaggcagcacaaagacactgggagatgtcaaactggccagcacacccaaacccgacaacagcaaggaaatggcccgtccgatagccagcaccatcaaccgggctttcaatgacttataacctaaaaaatcaggaattatggattacgatgaattagtacagaaaaacattgcaggagaaatcagtgacttagagtttctacttgcacaggaagagcttgcacaagcctatcaagaagagatggctgccaagcagcaagagacaaacaaccaaacggccagagaatggctgcttgattacgagaacagaaatctataccaataaatcatggatacagcaagtgataaagcattacagcgtttcgccgaactgatgattttatgttgaggtcaacataaaatcattaatgttgcccatttgtttatgtcagtttctttcatatttatttgataattagagttcttatcgaattttgtacaacataattttggatgctcgtttatattatatagtattactcatataattataagagcatgttagaacaaatcattatccgcaagtcattccttaaaaaacatttggctgcaccattattaaaggagcgagaatactttctaactatgaaaagtaaggaaggattgtcccggctaacactattggggtgggctgggtattcgctcaagtttatccaatatttcgatcttcatgatggcgaaaagagaattgtgtcacttgatgatgtcgttgaagctgcacgtcaatggtcttcacccattcctgatcattatcattctcggaaacgtcatgattgcccttcctcaagaatcaaattcattgagatggctgttgaattcttactatacgtaggtcttttagattctcgttaccaagacgacatcatcaattatctcgcagagcgcaaatggcacagagtcagactgattgccgctcccttttataaagagagaatgtctttcttgatggattgcaaatcaaaaggttttaaaagacagacacttcagctttatgcacagtatcaacttcatctaatagagtatcttgatttaaagaacttccgtattgttaccaatgaggaaatctcaaatgcagcaaaaaaatggcaaaacctggaagacaaaggttctcacaagaagaaaggcaccaagtctaattatagtttcttcatctattttgcaaatatgtggcttaaagagctacatatgctaccagaatcaggatctccttcaatatcagatatacgcataaatgaataccttaatcacttggcatacaggagatattctcatgcctatattaagggaaggagatatatactcacctacttttacaagataatagaaaaggagaaccaggaacaccctttaacattggaagatatagataaatacattgaatactacacgattaacaaggttcaacgtaacacgctgaaagagtacctgtgttgtattcgtgtatatcttcgttatgcagtcgaaaaggggtggtgtattaccgacctagataaggcgttaatcactcccaaagtatatagtgaagaaaatctcccttctttcttgccgtggaataaagttcaaaaactgttacaaacagtcaaagaacaaactggtaaatccgcatcgcgcgactatgctatttttatgttacttgctatgtacggtttacgttgtagtgaggtggcaaacttgaagattagcgacatcgattggcgtaaagaacaagtctatattaagcgtgcgaagaattgtcgaccacaagtgttaccacttctacataatgtaggagaagctattatcgcttacctaaaacagggaaggccaaatgacataggaagcgatagcttgttcttttgtacaccagccccgatacgtcctatatcttgtacagccatagcttccgtcgtatataggtatttgaaatccagcgaaatggacgttaggcacaaaggtccccattgtttacgccatagccatgcaactttcttgataaacgaaggacaaaccttaaaggatgtcggtgatttactgggtcacaaaagtatggaagcgacaagaatatatgcaaaagtggatctcaattcacttagagatgtttcaaatattaactggggggagcttctatgagtataaaagaaactgttgagtcatttatcaagtttcgtaggtctattggtcgtaaggatcagagtacaacttactctttgagattatttgctaagttcattggagaaacaacagaattaacttcaataacggaaagcgattgtaatgccttcctttacagaaaaggaaatgtcatcaccagatattggcattctcagcactgcattctgaaaaaactttttgagtgggctttttctagaggactcattcaaaacatacctattcccgtttttctgcctaaagctccagagtattatcccgcttacatatatacggatgacgaactgaagagactgtttgattgtgcgcttacatatcgcaaatatagatcatttgttaatgagccaatatgtatacgatatatcttgatgatcacgtatatgcttggactcagaataagtgagaccttatccttaaaaataaaggatattgatatggataatatgtacgtgcatatacattgtagtaagttctacaagtctcgcttggttactttcaacgaacaaatatcaaaattgatgcaagagatattacaatggcgaagtactcaaatgtccccaatggtagaggatgcatatgttttcattaatcagaaggggaaacctgttaattttgtatctttacatcagatatttgcgaccattcgtaagaatgcaggtctttatttccctgatagaggacgtcatcagcctagaatacatgatcttcgccatacttttgcggtcgacgtccttactaactggtataaatcaggaaagaacgtacaggatttactgccgaagttgtctatctatttgggacatcttaacgtgtccttcacttccgtctatctaacaaagacgccaactttgttgcaggaagcaaacaaattgttttatgcttataaaaacacgaacaatgaagaacagaagaattactgaaacagaatatcttggctattggctaagaccattcctcatagagtacttaattgtcactcgaaaccttagtcgtaacactcagatgagttatcgtgatacattccgtatgttggtatcgtatgtctctacattaataagtattgcaatagacaatctcaaaatctcggatattacgactgacgttattacgaaatttcttgattatctggaaattgagagaaaagtttccgtatcttcaagaaacaatcgtttagctgcaataaaggctttcgcaaagtttctggcgtggaaatctcctgaacatatagattggtgtcaccatgtcactcttatcccttcaaagaaaacggaaaaacgcatgataacctatatggacaaatctgagatcgaagccttggctgatgcaccattgaaaacatgcaaatatcaagggataagaagtcgagatcatgtcattatcctattcatgtataatactggcgcccgagtgtctgaagttattggtgttaaagtgaaggatgttgcgatgccttcaaaacgtggaatgccaatggtgacattacatggcaaggggcgtaaagagagaatatgtcctttatgggaggatttctgggatttactcaaacaatttatagacaacaagttgcctgacgattaccttttccttaaccgatacaatcagcctatgagccgattctgtatttatgaaatgataaagaaatactcacaagatgtaatcttaaatcatccctctcttgctaataaacgcccatctcctcacgttatacgccatacaaccgccactcatctacttaattctggagcggatattgatatggttagaaattggatgggacatagctcgattgatacaacaaacatctacgccgaaattagcatggaaaggaaattagaagttctcaaaaaatgtgagcagtccgtttccgatacaccatcacgaaaatggtctgaggataaggagttaattacattcttagatagcctctaattcctccaaagatagaattatgttgtgcaaaatgtcaaagaacgattgattattaattgtttagactaatgcccaacataattctatgtcagacataaatgatcgaaaagataaagcaggtggaagacaactggcaaaagccttggttcgggataaagggtgggggacttccgcaaaatatcgagggaagaacctacaacggagtaaattccttcatgttgtttctactttcggaaaaagagcagtacagcctgccggtctatatgaccttcatgcaagccaaagacaacggccttaacatactgaaaggagaaaagtcattcccagtcatttactggaatttctcagtaagagacaagaacggaaagaaaatacctttcgacgtatataagaacctggataaaaacgagcagcaggaatataaggtcacgccgtttctgaagacatacaatgtgttcaacgtacagcagaccaatcttcaggaaacgaaaccggagaaatgggaagcattgaaggagcaattcaagataccggccatcaaggacgagcaagggatgctcaccgtgcctctgattgatgcgatggtacgggaacagcaatggatctgccccatttattccaaggaaggaaatagtgcttaccatgcaaggggagaagataaccatatcgtcgtacccctgaaggggcagtttaaggacggagagaatttctactccacactactgcatgagatggcgcactcgactggagaacctgagcatctgaaccgggaaaaaggcgtgattttcggagacaagcaatatgccaaagaggaactggttgccgaactcacctccgctaccgtcgggcaaagcctgggaatatccacccatatccgggaagaaaatgccatgtatctaaaaaactggctgggagccttgaaagaagatcccaaattcatctacaacatccttgccgatgtaggaaaagccagcaatatgattcaggaacataccgcacggatggaacagtacctcacaccggaggaacggttcacgcaggccgtcctgcaagacaaccgtccggtattggagcagatgaaaaacgaaggttttaccccttcatcacggttattggaaagtgttgcggcaaaccatcctacagccgacaaccttgaaacgctacacagcactttcggcatttcgctgccttccatggaagcggagccagccatgaaaaatatgaatgagccacagctcggattataaacttttaaaaaccatcattatgtttacaggacaaattatcggttatgtcggtgcggatgcccggcagaacaagaacggaaaaggattcaacttccatgtatccaccaagtacaagaacgtgaacaacgaggaacagaccctatgggtatgctgtttcgtgaattacgagagtaaagtctttgagtatctgaaaaaagggacacaggtatatgtctgcggcgatgtgtatgccgatgtattccagaaggatgacggtagccacatcccatccgtcagcctgaccgtctcacgcattgagttactgggaaaggcagagaaaaaagagagcggtgacggaacggcatccggacaaccccaataacagcaacggccatggaaagagagaagaaagacctgtcattcatcctgatcctgctatccacgctcatcgggacagccgtactgtttcagtgggctatcgttacgggattatacgctccactacgtaatccggccatgtgggaaaggctgatggagaaggatatcctattccggtttctctacgttatcctgatcggaggcctcgcttttctctttccggttggcaaagtgaaagacgaaaacaagaaatgggtttacaccagtatgacactggttacggcatccatgctggttgtcggattcagccggttatcagcgtggtataacctatttgtatttcccattctattcgtagcgtacacgctgcttgtcatcaagactctgccttatttcatccggcgtcatgcccaatccgatgatagcattttcgggttaagccgggaagaatcggctttctacttccgctttgaaaccgcctccgggccgctggtcatccataagccgcagcagaatgtctatatcgacggcggtccgggaagcggtaaatcagagagctggatcaagggaatcatctaccagtgcgccgagcgcaactatgccggattcgtgtacgattgggagggtgatcccaccaaggacaagtcacccatcctctcacgtatcgcatacggaagcatcgaacatttccggaacaaggggatggaaacaccccgtttcgcctatatcaactttgtggatatgtcacgcacggtcagggtgaacgtactttctccgcaatacatgtcaaagggaaacgaatcgctattcatccgcaatatcatcatgacactgatgaagaatctggaagcaagctggaaggaaaagaccgacttttgggccaacaatgccatcaactacgtctattcaatcgcctataaatgtttcaaggaaaggaagcttggtatctgtacgctgccccatgtgatagcccttgccctttctgacagcaacctagtattccactggctgtcggaagatcctgaaatcgcattgaacatgtcctccatgctgaccgcctggaaactgggtgcacaacagcagacagccggagccgtatcatccgcacagactccgttggtactcctgaacaacaaatacatcttctgggtgttgtcgccacttcccgaagaagagttctctttggatataaccaacaaggaacacccaacgctgttatgcgtaggcaatgcgcccaccatcaaggaagccgtttcccctgctatttcctgcatcggcagcgtcttgatgtcacagatgaacaatcccggcaaagcgaccagcatattcatggtagatgaatttccgaccatcctgttgcaaggcattgacactttcatcggaaccgcccggaagcacaatgtcgctaccattctcgccgttcaggacttcaaccaagcggtcagggactatggagagaaaagtgccaacatcctgaaagcctcctgcggaacgcaggcttacggtatgaccggaaatgagaagaccgccaaagacatcgagaacttgcttggggagaagaaagaagcgcaagaatcttattcacaccaagccggtggcaataacagtgtcacggagagcctgcaaaaagaaaaagtcttaaaggcaagggacattgccggacaagcagccggacacttcattggcaagattgccggaggcaagccgccattcttcagcgtgcagatggatatgtgccgttttgaagagaaggagataccccgtttctccttaccggtcaaactgggcaacggcaaagaagagatggaactggaaatcctggaagagattatccagcagaactacatcaaaatcattgaagatgtcaacgccatcctcaaaaagatagaggacaaattaaaagaaaagtcagcagttccgccaaccgggacacacaagacagaacaaaaaatcatccgataacattcaacaaaagaatcctaccatgagaaaaattcattcattattagcggcagcctgcttattggccgcttcatgcaacaaagaggaaatccaatcggaaacagacaaagccggcatgtatcacatcaccgtagccgtaaccggttcctcacccaaaggcagtgtgcatatatataatcttgacggcgtgagattcaggaacgaacgcaccggtacctccgcagcttccgtagatgagagtttcaccgataaagcggaatacagcacggaaaagcctgtcagccaaattaccgtgcaaggcattctctattcaaaagagagtgctatcatcaccatgcagataaaaaaagacggggaaagcgtattcaaccagagcaaacagttggaggccgttcccggtatagacactactgttgatttggtttacagtaccttgaaataaaaatgcagacgaatcaaaaaacatatactttctcttccatatttagatgatatttcttatctttatgaaagataatctttctcatttataatctaagctcagataaaatgagattcaactaatccagtcaacgttatgaaagtcgatttcaatcagataaaaacaaccatttctctgcccgatttcctgctggaactaggatggaaaatcgtggaaggctcttccaactcctgtcccaaaatgagcaacggaacgcataccatcgtcatcaagcggaactcgcagaaccaatacacctattgggacgtgcatagtgacagcgtgcgtggccgcagtatcatggatctgatgcaggaacatctatttgaaacaaccggaaaaatgccgtccttgcgcgaggtgggggagatccttcagaactacatcaacaccaaccgcatcacgacacccgaaaaaagccggtatgaagtaggtaacacaagcatgagagcggacgaacttcaattctacttgagccagctacaaccctacaagggcaattatctccagaaaagaggtatcctgaaagaaagcattgaaagccggttcttcaaagacactttctttatccgtgaggtaaagaacaaagggagtgtttaccgcaacgtgtgcatcaagatgtacaatgaaaacggtgtgcaagccatttctcaacgaaatgaaacattcaaagggattatcggtggcaagttcgactgtctggcgaccagcaaccatgacaaaagccgcccgatagacattctctacattggggagtcatttatagactgtatctcccactatcaattacgccattccggaaacgacctcaatcttgtatatgtatctacggaagggacattcacggaaggacaaatgaggctattacgcctgattcttgacaagaaccaggtaaaggagctccggagcatctttgacaacgacaaacaagggcacaagtacactctatggctgcatcgttactttcatggcgatacgactgatgtcgagagcctgagtaacgatgaactccgcaacaaggtacggaaactgaagaacgtcgaactttcggaaaacaaggattggaacgatgatctgaaaatctcgtgtggcatctgttcctccacggaggacggccagtaacctcatagatttgctccatcacataatacgacaacctataaaatcagatcaatatgaatatcaagcatttatttttttgtatgctgctcattgccttttcctcatgcagcaaacccggctatgagaaggccattgcggaatgggttcagacagattctcacggcacctggacggatttaaagttcgaactactggaagtgttggaaacagaagacgtcaccgtatcggacagcctgtgctacctgaacaacaaaagcgcacaattatccgctgtcatacagaaagcggaaagtccccgtgccttattcaaaccgtccttttccgcctatatggaagccgaaaaaagcctgaaagcaacggatgccatgaaagccatgtacctgcaccgtgacagtacggaagttatcggcaagatattaaaatgcaggtatgccatcgtccagccacactcaggggtgcagcagaaaaagacggcttctttcctattgtcccccgacatggaaaaatgtatcggcaaactaaagccgacaagcaaataatccgagcgtaacgatgtgtagcgacaacgttttttggggttcttttttgggcgtcttccaaaaaagaactcccacacatttagatgtgtgggctattcattacactaccatcctttcccttatcaacggtatattatcccgtaccaaattcagaatccggtcatgataggctgataattggttagactttccacgacactggcacacctccatcctgctaagtgaaaactccaccgtttccatgcgccttccatccaccgttgccgacattatcaacgaatcttctctcttataataggcgttgctgaatacacaatgatgcagcaactttccctctttgtaaaagtccgaaaggctttccaatacccgaaccataatatttccatccgcaaacgaaagattaaagaaacgtgatttggcagcaatatagtctttttcatccttttcagaatattttttcttacatttccccatcacccaatcatgcgcttcttctacattcaacggacacaaataatgaggatttctcgcatccaatttattttctatcagcatatccacatagtccagccacaagtccgcatcatgtatcacatagtcatgtcttaaacagatttttacatacgtccaatacttatctataccgtattttctctctaaaaatctcaagaacaaattcatttgccctgccttatataatatctccatccgattatcagttaataatgtcataaagaaggaactcggacaaatatcataaaaggcacccttaaatccattcctcgtaagttcgggtatcactttcattctcggatagataactgccgggcaaatatcataaatacggtcatgatgcacattccgcttacgcaattccaaagaacttccatatatccatgcatcgtaataaaatatagacatgccccgcagcaaagacagcgtttctgtcttgccctctttattcatccaacactgtaccgcctcaattataaagtaattagccggagacccttttttcagccggcagtccaccataaaaaaacggataacttgatattgcttgtatgtagtaatcacacaaaaatattctttatatacagccgtccttttcctgctattctccaatttcaggttcataccgcaatgaggacatttacagtttttcttatcttccttatcccgccatgtatgcccacaatccaaacaaaagcaattcccctttgcatcacgcttgaaataatgcacaaagcaatgtttataggcataacgcttttgagcctctgaaacgggagctaacttcctgctcccattcacgatttccatttgtaattttgtcttgggtttcatatcaaaaaagagttaactgggtttgtacttcggtgttgttctcacgtttagcttgttgacgcttcttcaactttgccaattcttcctcctgcaattttttgatagcagcctcacgagccgctttcttttcttcctctgacaattcaacatgatgatttacgactacattacatttcaatgggctacccacctcaatattatcttcctgataatagtgcaacgccataccaaaaatttcatcatcactaaaaccacagcaaccgcttttcttcacttggtttaaaatataggtaatgcaattatctatattctttgtaggtttttgatagactggagcaaacagactatccaccgctgccatattatcaaggtatgccttgatggtacttttaaattgttctgacactttcatagtatatcatttttagatttcatttcacaataagccaatttcacgagaaacaaggagaataggcaaataagagccaacaacgtaaccgacacaacctttatcggacttggcgttattaccgctccgacaaacatagccactgcacaaagagcgatgatgaccgaaaaaacaaattgaatgatttgcatatacttctgctacttagtttgttaaacttctaattttatgcttcagctagatttaaagacctttttttaaaacccctttccgggatggccttttctttctgccgactttttttttgagctttcatgccccatctgagtttatgagccttttttttacggcacacaacaataaggaaggagggattaagaaaagttttggacgacaaaaaatgttggggacagcgaagccgtccggcgttatttttttcgggacaaagggcgaagaccggaactctttcgtatccatccaccgaaataaatttgccgttcaaaaacaaaggatctcagatggagctatgaaaaaagcacattaggggaggcagaaaacaaggaaaagggcagtacggaaagtaaaacaaaccatacggttttgcttgcaaaaccgtattcctatctccctgccacaagtgacagggggggaacgggttagcaacggactgccgggacaaacggtaaaaggaaggaactgcaatacggaagaaggaggttgtttcggcaatgccgaagctccggatgatgaccattgcaatcccgcccacgtttggaacttctcttttctggtttgcccataatcagccgcatagcggatgactacgggcaaaccgggaatgagaacagtcattccgatgaaggggagggtggggaagaatactgcgtgaacgcaaaaacactctcggatatgtagcaaaaaaaagcggcactaggccgcttcaatcatttgcttgcttttttctttttagagacagccttctgtttaggctgatccggtttttcttcttctttttccggagccggataaaacttggtggctaccatcacaatgcggttacgcttctccccacttttagaatccgtccattcttccggcttaaagtagccttcaacggttatcagctcaccttttttcaatacatcgaaggaatccagtgcttcattctttctccaggcttcaatccccatgaaagcggaaacataagaggtttcttcacctgtcttgtctgcacggctgaccgcgatagaaaagcgtgctacgcttgctgtttcaaaactacggatttctgcatccttaccgataaaacctgttactgcgaatgaattttcaatctttttcatatctctgattttttagaagttaattaatcaattttacagtgcaataactgattgttggctttgggggacaccatgaaaaaagatataaatactctttttatgctggccggaaaaaggaagatttgtaacttttttattggtgaagatggcagcaaataattcgggttaaatacgctttttatgcaaggcaaaaaaaggaagatttcagacgaataacaacgtggtgtttgtgaatcgtccccttatccccgtaaaaggggttagcaacaatctatatttgcaacggaaaatgatttgacttccctaaaaaatgatatgaaaaagacaaaacttgaaaatcagcaacaggtttggaaaggatgcaaaaaacaaccggtcagacagcaagcatggcacattccgaaaatatggtcagccgcctatcgacacaccggaagaaacctctgcaattccttttaaaaaaatgaagccgaagaatgaagcatacaatattccacgtatcgaaaaaagtgactgcacgataaaatgaaaggctgcaacggaagaacagacttgcggattctgcggggagaacataaccatacaggcatacagccactacaactgtttccggaaaaagaagattatacaaccggaaaaacagaaaggcatccactcggagaaaagcaagcaaacgattgaagcggactgccgatttagcggcgaaatatccgactacctatatacagccctaaaaggctggggcatatgggtaagcaacagactgccgggcaaataaaaggagagtggcatagccgccggaaagaggttgtctcgatgtggccgaagctccgaaagcagaccggatatgcctctctcctttgccttccccattcctggatttcacacaatcacggagcctgcgagtgactatgagaaatcctgaaacggggacagtcactccgctgaaagggtgggtgggaaacatgtgactttctccaaaataacaaataggggtataaagatctcaaaagaaaagaaagccgttccagaaaagactggagcaactatcaccatctactgttctttaagttaattgcagcaaatccaaatcatcagtgaccaatccatccaatacatgttggattttatcaaatatagccttatctatgccatacgtggcgcataacgattgaaatttgcttacagcatcgaacacctgtaatatcttcttttcgggctcctctacaaaatcctcggcaaagttgacgaaatcacttgtagtcaaggcagaccttttgcccatcacgcccatcgaatgaatgtgtgctgaagaattttcccatgtatttgccgtgaacattacatcatatgcaggtgataaacgccatacccctgccttatccatgataaacgatatgttcttattatgatcatcggatatacctgcgacataattaaataccattctgataaatatctgatctttgtcttcctggggaagtttcagagtctctgctatccaacacagcttcatataatcatctgcacccggcataatggccgcaagggtctgactaaagagcttttctccattcttacgatcaaatctttccgttacgaaatgatttcttccatcaatttctttcaggaagcatggcatcatgttgattcccgccgcctttgccatttcgctatataccatttctatctctgtggtaggagagtcatctgcttctttaaatttgatgatatactgcttaaaattttcaggcaaatccacctggccggaacgaaactcttccgtttcgagattataggcaatcactgccttcgggcgcatgccaccggcagaagttccaagatatatcaactttttcatcgtgaggctatcctccggtgatatgacagcagcatctcgatcattatatattttagaagccaaagttgccaatgatgacatatttactgactcatggatggcatcatcattaaattccggttcaaattccaatgctcccatagccctcttgccaatataagagagcttcaatagaggcaatgattccgtaacctttatattattatccgtgagccattggtcaaatagggaagccccccatttgtcaggaagcgcatctgcaagaaattccggaagcccttgatataatttatctttattcccatagaaagacgcaaacaaaggggttctcttagggtgtgtggaagggcatatatcataatcttgtttcctatattcatccgtaaattggaatacagaacaatgcttttcaaagtcccaattcaatttgccaatgcaagtcccccacagatatacattcactataatcggctctttcttcataccatcttacgtttaccgttaattctttgtattcttttacctgttttttcattgattaggaaaggggagtctggaagttccggaaccaaaccgacaacgccttcaagagttccacttatacgcaaaatcttaagcaatgtacttagggcaatatcacttactttacaagattctattctcttaatagtaacgatagatactcctgccttatccgcaaattcttgctgggaaaaacagcagctaagtcttatagacttaactctcttgcagatttcctttacaatacattcatctgaaaattcgtatattgtatatgtatcatataatcttttcatagaaaaacatatttaggtatcatttttgatacaaaaataccgataaatctgaaaatcaccaaattaagaaacactttttttataatcttctgccgcattagcaaacgattgaagcgaccttgtgccgcttcaatcgtttgattgctttttctttttagtccgggggttcttatttttccggagtcgggtagaacttagtagctaccatcacaatgcggttacgtttctccccacttttagaatccgtccattcttccggcttaaagtagccttcaacggtaatcagtacatctttttgcagtatccaaaaagcatagcggtcttccatcttactctaggcttcaactttcataacagaggaaacaaatgttttttcttcatttatcttgcctatgcgactgaccacaatagagaagtgtgcaacctttactatttcgaataaatggatttctgcatccctacaaatcctgcctgttactgcgaatgaattttcaatctttttcatatctctgattttttagaagttaattaatcaattttacagtgcaataactgattgttggctttgggggacaccatgaaaaaagatataaatactctttttatgctggccggaaaaaggaagatttgtaacttttttattggtgaagatggcaacgaataattcgggttaaatacgctttttgtgcaaggcaaaaaaaggaagatttcagacgaataacaacgtggtgtttgtgaatcgtccccttatccccgtaaaaggggttagcaacaatctatatttgcaacggaaaatgatttgacttccctaaaaaatgatatgaaaaagacaaaacttgaaaatcagtaacaggtttggaaaggatgcaaaaaacaaccggttagacagcaagcatggcacatcccgaaaagatggtcagccgcctatcgacacaccggaagaaacatctgcaattccttttaaaaaaatgaagccgaagaatgaagcatatcatattccacgtatcgaaaaaagtgactgcacgataaaatgaaaagctgcaacggaagaactgacttgcggattctgcgggagaacataaccacacaggcatacagccactacacctgtttccaataaaagaagattacaccaccggaaaagcagaaaggctccactcggagaaaagcaagcaaacgattgaagcggactgccgatttggcagcgaaatatccaactacctatctacagccctaaaaggctaggacatatgggtaagcaacagactgccgggcagtcactccgctgaaagggtgggtgggaaaaaactaagtggacgcaaaaaacaaccttaccattgggggataaacttccccctattttcacttcacatattctttaccccacttcaattgattcaacaaacttcaacaacaaagcgactgttaccgtatgaaatgaaagctgattgaacaacttatgcgctttcagcatctcaatagcggcttcagccgtaacaactctctgttcataaagccgaattgtcgcatataactggtcatttgcgacaggccccattattaggtcatagtcaccgttttctcttcctctgcggttgttgacaacaaactccagccattcttttgttgcacccataaaccgaagaaccggatattccctatcaagaatatcatcgggaacttcataaacagagacgattgctttttcgctctgttccctgttcttcttcaacaaagcccatttttttgcttgttcaaagttggttgtcgtataaaatcccttcccaaagtccgtagccttccgtcctttctgtatattagggcgtttcacggtaactgtagatccatgaaatagtctcattttcttttattgatataagtcgttatagtatctaatatatattcggggtcttgggtatgaagcatttcaaaagtctcatccaaaaaatcaaaaaccccatagtccgaaaacaacaacaaggtttcttccgcactttgtttcttttcctccctataattctcaatgcagaacatcttgaaaagcaggatcttcgtgtcaccgttataccgtcgtttttcttctgttttttccttctccaatgtttcataaagcgacaatgtacttgaataccataacttggtactcttatccagcaaagatttatacaacttggaagaatatatataatacagtgcatcgcctaaaggcaatgcctttttcttcatgaccagttctaccagctctctcatcacgaatgggagcatggttgagtcaagttctccttgatttttatgagtaatttccatattcttgttgttattactttagcatattttcgaaaacaccttcttcacagttctttatacacacctgacactcggccaccacttctcttaatattcgggcacattcttcattcgaatgcccttgcagtaattcataggcatatcgcatcagttcattagcttccattgtttccatccttatcaataatattcaagttcatcattattttctgcaacgactccatatttggagttcctaaccaacacacacctatgcaaaaggtcatattgttctctgtatctgaaaaacgcatattgttttaccttttacaaacattgttgtcccattaaaatctaaaagagttctttgaaatatttgaaatttagttagttacagcgattttccgagcgaacggacttgaatttgtagctttgcatcagattaatccgatggcatatgttccaagacaaatacgttttcgctcaattggcttcatttctgaatcgaagtaagtttaaccgcatagtcaccaagtatgatggtgataaatatgtgaagcacttcacctgctggaatcaactacttgctttgatgtttggtcaactttctaatcgtgaaagtctgcgagatttgatagttgctcttgaagctcatcattccaaatgttatcatttaggaatgggtaaaaatgtatcaaagtcatcgctggcaagagcaaatcaagatagagactatcacatctttgaagaatatgcttactacctggttagcgaagcacgacaaaagtgtgctaatcatattttcaaacttggcggtaacgtttatgctttcgattcgactactattgacctgtgcctttcagtcttttggtgggcaaaattccgcaaaaagaaaggtggtatcaaagtgcatacattatatgatgtggaaacacagattcctgcattctttcatatcacggaagcatccgtacacgattctaaagttatgattgaaattccttatgaaccaagctcttattacatctttgaccgcggttataacaacttcaaaatactgtataaaattcatcaaattgaagcctactttgttgtcagagcaaaaaagaatctcgggtacaaatccatccaatggaaacgtaggctgcctaagaatgtgctttcagacgcaagtgtatttctgacaggattctatcctaaacaatattatccagagccacttagattggttaaatattgggatgaagaacaagaacgagaatttacattcataaccaatgcgatgcatatatctgcgcttcaagttgctgaactttataaaaatcgctggcaggtagagctgtttttcaaatggctcaagcagcaccttaaaatcaaaagattttggggaactacagagaatgctgttcgaatacagatatatgctgctatatgcgcttactgtttggtggcaatcattcaacacgatatgcaactgaacagaagtacatatgaagtgttacaaatactgagcatctcattgactgataagactcatctgagagacctctttgataaaactaaatttcaaaatgacaaagaacgattcggaccaaatgggccaagtttatttaatttttaattcgtcccaattttaatgggacactaatgttttacaaaggtaaaacaattaagtaaaattcatctatcattgcttttcatatttattgtgtctttctcttttgcatcggaagtattagcacttacagcaaccagacagtatgacatcgccacgtttgatcataccgctggaaaacaacgatatacaatctgaatcaaaacagattgtatatcaccaatttctttttttgtgccttgttaaacgtataagaagttcctccggcagattttccatcccaataggcaatcagcctacaggcgtgtgaaatcatgtaatcattacggtgggcatagcattgggcataataatattcggatagaactaccaccttgtcggcttggcgcaaaatatcagcatacctctgtttgtcctctttgttgaaatacacatcttgcccgacataaggaacaaccgccaccaaaaccatatcgggatattgtttcctttgttcaagtacggtatgagcagccatcatgtcaaatccaaccgcacaaccaatatagaaaaaacggattccattctcatagcagaaacgtacctcttcattcaacgatacggacaaagcatatttatttgttcgtatcgttctatgaccggtaaaagcaacggacatcattttcatccatttatcacgtgcctttctacatatatccaacgaacctgccgaagtttcatacaccattccattcacctcataacgataagtgaaccaagtagtatctccaaagatatccttctgcttctctatataactctctttttctttcatcttataacatacggacaactgttttacctaaaaagaaacctcccaaaacctcacctcctattttttccaactgacatgcgaaacgagcatacgaaaacccttttgttaaaatatcgtcaaataccaagattttcttaccccgaaaaaagtccttgtcaaattctatcacttgtactttttgaagcgacttgctgtcaaatttctcgtgaatagccaaacgatctccactgacacgtatatgttcatacgcattgatagcacctgaaaacttacacacagccgaagcaaaccccttataacgaagttcattcttatcagcggaagaagccggaacacaagcaaaaacaatattcttaacatcatcaccaaaaacttgatgtaacttattcgctatcatccaagctatattcaaataagcttttccatccttaaaactccatatcatcttacgaatttgccattctctttccgttgcctgccgatattgcataggaagatactcaaagaaagaaaacatcatcttatgccattgtctgtctaaactaggatatttactctgatgtgccatagtcttttatctattaaaattaaacttatgcttcagctagatttaaagacctttttttaaacccctttccgggatggccttttctttctgccgactttttttttgagctttcatgccccatctgagtttatgagccttttttttacggcacgcatcaataaggaaggagggattaagaaaagttttggacgacaaaaaatgttggggacagcgaagccgtccggcgttatttttttcgggacaaagggcgaagaccggaactctttcgtatccatccaccgaaataaatttgccgttcaaaaacaaaggatctcagatggagctatgaaaaaagcacattaggggaggcagaaaacaaggaaaagggcagtacggaaagtaaaacaagccatacggttttgcaagcaaaaccatactcctatctccctgccacaagtgacaggggggaacgggttagcaacggactgccgggacaaacggtaaaaggaagggactgcaatacggaagaaggaggttgtttcggcaatgccgaagctccggatgatgaccattgcaatcccgcccacgtttggaacttctcttttccggtttacccataatcagccgcatagcggatgattacgggtaaaccgggaatgagaacagtcattccgatgaaggggagggtgggaaagaatactgcgtgaacgcaaattaatgggattaccagtaactccaagcgttttttgctacttttttggggtgcttgccaaaaagtagcggacagcaaaataccctcccttccctaatccaaaagaagggagaatgtgcttcattgaaggtatataggttccgttccctgattataacaatacatagtgttatttctgaaaccatcaaagcatatatgaaaatcatcgaaatcctgttccgtggccaaacgaaccttatcactcaacaaaaccatgcattgtttattgacagatgtagccaaagaggtagtacgtcccggctttatctccaatgccaccacataagaagtccttcgtggatagatatacccaataatttcctcattgagtacaaccaaacgaataacatcttcattcaaaacgggaatattattaattttgcccatcattgttataatataaatcagtttataatcattaaaatacaatatcattacaaatgatacctataatttttataggtaaacttttccaccgagaccacctcataaagatagtcttcatggcaagaagccattatacagttctcacattcaagaataggatttataactacacggaatttaatagtgccgtccaccagaacaaactccacccgattaaagaacccttgtagagaatgcccttccttatccatcagacgcactacttcacctgtaaaaacagccaattccttagcctgccatttcgctttacgcaaacaactgttcgccgctttgacgttctcattcacctcttttgttcttattgctttcataccaaaatcctttttacatatttatcttgtcaaaaatcaaaagtcagctgcgtagcccttgcgttgctctgaatcgacctcttcaattcagaattatcctccattgcattttcaagtttcctaataaaagaagtgtcacctgcttccgttatctttaaaataggcaaccatactccggctatcagctgtaaatctatatgataacttctccaatgctgcattgtcaatgtattcatccatgcgacttcaccgggtacgctattcatcatcagattgacaacggtcatctttacacaaatcaaatctatatccgagccataacaaaaaagccttcctccatcattctcttccgcacatttttttacagcggaaagtagcatcctgccggaaccacagcacgaatcacagaccgactgtttaggtttcagcctatttccccccatacatgccatcaaatcagcaacgtgtatcggggtaaagaactgtccgttattcccatgactgacacactccatgaacatatctcccaagacatcgcaaaatccttccgaatattcagacaccctataaaacatttgaacaaaaagttccatttcatatggcttatatcttttttccactctacgataatcctccgccaacatcccgacagacaaatagtaaagacaaacatccaaaaaatcccgaaaggcttcttcatatccccgactgaaagcaagcttttcataaagtttcattatctcctttggtatcatacttttctgacttcattattcacaacattctatattccttgtgccatagattttatcaaaagccgcttttatctccgagcgatatttacagtccttctcaaaacaaagttgttttgtccaaaaatcgaaatcaaaaccatcggtattatcaatcgttacagaaacataatcagtcataccactctgacatacaaccgtatgccgatttacacaaaagtggtcatttaaagcagtttcttttcgggtaatgcgttctaccatcttatctatccacttcatacttataatattttatgtaattgccccattccaagaggcagttacggttatactcattaaaaatcgttctcgttcaaaaacagcacatcgcctttcatcaccatccaattaatctcactcagatgatagccacaatgcccactcaaaaaaatctcaatctcttcagtggtctgcaatctcctgtctgggcttatcaccgcaacattaccggaattacaatccaatacagccagtttctcataagcccactcaccaaactggcagaactcgataaaattggtataggttatccgtatgctattgtttgcatcaaattcaaggggtgactttgtaatgaatgaacctgcatgattcaccaccacagaggggctaatctctgccaatgaagataagctgtcatcccatctaatctcataaaggaaaaatccttttggcaatgaattgcggtctatacgataactggaaaaaagaccgtctatcgtttcattaataactaactgttcataatctccttctaaatagtgtactcgtgacataactcgttgttttttgggattgttaaacttctaattttatgcttcagctagatttaaagacctttttttaaaacccctttccgggatggccttttctttctgccgactttttttttgagctttcatgccccatctgagtttatgagccttttttttacggcacacaacaataaggaaggagggattaagaaaagttttggacgacaaaaaatgttggggacagcgaagccgtccggcgttatttttttcgggacaaagggcgaagaccggaactctttcgtatccatccaccgaaataaatttgccgttcaaaaacaaagggtctcagatggggctatgaaaaacgcacattaagggaggcagaaaactaggaaaagggcagtacggaaagtaaaacaagccatacggttttgcctgcaaaaccgtattcctatctccctgccacaagtggcaggggggaacgggttagcaacggactgccgggacaaacggtaaaaggacggggctgcaatacggaagaaggaggttgtttcggcaatgccgaagctccggatgatgaccattgcaatcccgcccacgtttggaacttctcttttctggtttgcccataatcagccgcatagcggatgactacgggtaaaccggaaatgagaacagtcattccgatgaaggggagggtgggaaagaatactgcgtgaacgcaaaaacacagtatgtcatcttaaaacaatatctttaaaaagtttttcagaagaaatgcttaccaatatcctaataattattacttttgataacataatacaacgatatggaaaagaaaaagattacaatagaggtagaaccagctacagccgtagctaccgtcggtttattgcgtgggatatttcccagtatcatcgaacaactggaaaggcaagccgcaacaaacggcagccccttaaaattcaataaagtagaaaatatgcaagaagtattggatgagatttatgaaaagtgcattgccgaaacgaacctccgggagtttgcccaggcgcacttaaatagtgacggattacctaactgatacagaaatacggaatctgccagccatccttattccaaataacaaatggtacagaattacacacctgtcatgtgggatgacaaagcatttgcctttgtcccctacgaagcattcagtgatttgccacattatcccaaagaaaaatgtgagcaaatttgcaaagagctgaacagccttataagactatgtacttataggccgaaaaaggaagatatttattttcatccggtaagttatgtacgtcgttccggaggtttcatagttacggataatcaggcatcctttgagaaatgcccctatcctgcttgcgcagaccgtcatagctgccaaaaaatatgtgatttgatgaaccgtatcattgaagagtcttaattatataaaataccatggaacatccaaactccaaatgcagaatagcacaagctgaatatttaagtcggctacctgaagaagaacgggaaaataaggccagagatattagaatcggaaacgccagctatatttaccaccaacaagcggttccaatccaagaaaacagattgataatgtattataaagagtggttggaaggtcttcctcccaacatttcacgccatatgagaatgcttggatttgaagcatgtaagacaatgattccgtttacgagatatgtgaacgaaagaaacgatattggtatgcgtgactggatgcaagagcatctttcaccgagtgacttcaactattggcaggaactttcgaaaaaagcaggttcgccaacattttaatcccatcccgttcaatacgctgcctgaagaataaaaggtgcgtattaaacgagaatattttttagcgtttagtcatctcttcccgcaccagttccgtttctgtcggggagagtttcggcaatttgacagttgccggactttctaactggtaagccttcacctcattgataagcagctgccagtcaaaaagaaattcttcggaacaaccatgtttacgataaatttcttttgctgcttccaaaatctcaggagcgcaaaaatcgtctccctgaaagacaactgccggacgatcattattgatacagtctctcaataatcgtaactgatctttcattgtgtttacctattatgcgttctgttgttttaccattttcaaaaattcgtcagacggtttaaatgccggtatgttatgagccggaataatcatagtagtattcttagagatattccgagctgtcttttgcgctctcttcttcactatgaaactaccgaatccacgaagatagacattttcctccttacccaacgaagtctttacctcgttcatgaatccttccaaaacagcaagcaccgctttgccgtcgatgccggttctggcagatatttcctttacgatttccgatttagtcatttctttataatttgaaaattagcgtgcaaagataattaatccaatggattatttaaagtctggcatccgcagcaagccctgccttcgcccaatgaagtgttaaattgttgcgtatgggtcaagttccttaatccgcttacacaaataatcaaagcgtttcttggtaagcggtgtgagtgtatcgaggttcttgccatcgaaattctctccgaaaataaggtcgtccactcctatgccgtgattgtaattctcgcgcacgcaatcacgcagaatccaaaggttatgcaggttcacccagtcggctgtaatgtttctgattttactgaacagcagcgcagcagtgtaaaggtagtgtccgcaatggttgtagtcatgcaacaccagcttgccctggtaatagatgtcgaaatccttgttttcttcatcttcctttgtatcgcagtagaagaatggaatgtctttcagaccgtcccaattaatataagtagttggcttcataatatcttttttgaatacgctacataacctgttatttgcacactttccattattcacagaacatttgatgaaacacttccttcagtctttttatctcactgaaattcaaatctccaatctttcttttcagccggcttttgtccaccgtgcgaatctgatccgtggctatctccccatcacgcccggctacagaacacagaacccggtaaggatagttccttatggtggaggttatcggagcaatgactactattgtaaggtacatattcaaatctgaaggagttacaacaacacatggccgtgtctttgccatttcacccccacgggtagggtctaactctacccaatacactccatactgttctaccatgtccaatcctcaaacttttcatcctcaaacacatcagggataagcaactcatcatccccattctcatgggcacgtttggcagcttccgcccatccctgccgtggttgtgcctttatcacaatattgttcccgtccaaagaaatgctcacagccgatttcaaggacaaacgcaactgtttcaatatctcggaaggaagtattatccccttgctgtttccaatctgaataatgtttgttaccataatgttataactttaaaattgattatcacaacacaaatatagacaaagttataacaataccaaaagaaaagccaacttttttccattttcaccgataacccggccaacggctgcactcgtcgggaggctagtgccccccttgccgtgcggcgctccccgacctatgattcttatcatgtcttgtgtccttttctccgcttctaacaaacaaatctgcataaaatatagatttgcgtttccatttgaattttagttatttgataccctaactatgaatagcaaacagataactgatttttaaaacagcagaatgtttctgttttattaaaataaaaagggaacaaatttttaaggtaatacttacggaaaaaacagactttataacgtttctttttcgtacatttgcaacaatataataaaagcgaaacatataatggagaagcaaggagaaatcatactataccaaccggatgaagctgtaaggttggaagtacgtttagaagatgaaaccgtttggctcacacaagcgcagatagcagaactttttcaacgtgacagaaccgttattaccaaacatataaataatgtttttaaggaaaaggaattggaagagaaaagcaatgtgcattttttgcacattgctaattccgataagcctgtcaagttctttagtctagacgtaataatttcagttggatacagagttaaaagcgtaagaggtacgcaattcaggcaatgggcaaataaaattttaaaagaatatttattgaaaggttattctataaaccaacggctcaatgacatggaatatagaatgaacaatagattcttccaaatagagaaaaccattgctgaacatgatgcaaagatagacttctttgtacgcacctcattgcctccggtggaaggtatattctttgacggtcagatattcgatgcgtataagtttgctacagatttaataaagtctgccaaatgctcacttgtgcttatcgacaactatgtagatgaatccgtgttactcatgttgagcaaacgaaacagtggagtatcagctactatttatacacaaaataaacgcacagctccaacttgatttaaacaaacacaatgaccaatatcctcccattgaagctagaacctacaaaagtagtcatgaccgcttcttaatcattgataatacggaagtatatcatattggggcatcgctaaaggatttgggcaagaaaatgtttgctttctccaaactggaacttcctgcccatacgataattgatgtattatgaaataagctaatcacccatgcgagaagcggaagagaatataaaattcaagatggaaattgacgtattggttcccattccacgtactgtcacccgtgatttcaccagtttgaagcacctgcgtcaatggcagaaacggaatgacatcgatggttctctttactgttttgcacaccgggaatacctgctcaacgaaaagggagaatgggaacaatttaccgttatcggcaaacaggtagtgactatcggagaactggaaaggcttcttttggcaatgaagcaaaaggggttcaaccaatacagccgtgaggaatatgaagaattaatgtcttcatatttgaaaaagtgaagaattaaaaccttcattacacatttaaatacgaaaacaggatgaaaataggatatgcccgtgtttccaccaaggaacaacatctggatatgcaactggaagcgttgaaggctgccggatgcgagaaaatcttctctgagaaaatgaccggacgtcaacaaaaccgcccggaactggatgcctgcctgagctttctccgggaaggcgacacacttgtcgtatataagctggaccggcttggccgttcgctgaagaatatccttacgctattggaagatttcaagaataggggcatccaattcacctcactgcaagacaacatcagtacggaaggcgcaatcggccaactgatgaacaacattctcggtgctttcgctcagtttgaaagagaccttatctatgagagaacccaagaaggcagaagaatcgccaaggaaaaaggtgtcaaattcggcagaaagacacttatcaacaaaaacaacatcgccaagcagaaaagctgcatccaactctatgaatccggaacgccggtaagggagatacagaaaatattaaacataggcagtagcggaacagtatatcgcctattaagaaggaatggaattgcgctgaaatccgagaacaaaaataacaaataacgaataaacctctgcccatccttcaaagatgattctcaaagatcgtctgcaattccacctctcagcaagattataggaaagtccccttcacggggactgattttttttaattttaatacaataactccatgcactcctgtaccgctttttccaatgcttcttccaaacaacaaaaagcgtccgcattactttcggagtcatacaacacataatctccagccctcacaaccacatgccagaccgccacgttttgttctgtttgaaacgtatattcacgagtctgtatcatccattggatacatgctgccagtgtcgggcactcgcacatatacatcggggtattccttccctcaatatcggtgcgtagcctatcctgtttgtcataccaatactcacaaggcacgtaatagtataattccttcatcataagagctgtgtcgctattaaccaatctctctttgttgatttgtgtaatcaaattttccatattagcattatttaagttgaacatctgatttattcttcagctagattcaagaccttttcattttttgtatcgggaaggtctttggtcagccgaccttttttttgatgtcattccccatctgagttctgagccttttttcggcatatcaaggtctggattgcaagcaataagccaagtttcacttatggaaaatgtcgggaagacacttcttcatcgttattttccatacagtaaaggcgcatggccgtaacttgccatttgcggaatcccgaaacctttgccgagcaaaaagccggactcggatcggaggaaagaagccgggggaggcagcccacagaaagggcaatccgatacaatcaagaaattaacctgctatacccttgtgcgagtgaaataatccatcatagacactacatacctaagtagtggtatcaatacaccgatcacatatatcatagcgtagcccaaaaggacaaaaggtaatgttttacgataaagacatgcaacagcgagcaatataaacgaaaaagaaaagccataaaccccatattgaaaaccgggtatcaactcataaacaggtacgggttccggatgaagcatggctccggccacaatagaataaaggctggtcaataatataagcagcgtatataagcaactcttaagaatcctgggatcattccttttacaatagagaatcgttcggatatcacttctaagaaactcaatgcccagtaagagagccaccataacgcctgtatcaaaagtagaaaatacattcattccgatcacctttggcgcgaagatatgtatttattctgaaaagccacgtctttgcgtattttacgatgtcgcatccgatagtccgggaagcatttttttggttcttttttggggtgactgccaaaaaagaaccccgaagccgaaatcccgggcagacgggatttctcccgtccaccttacctattttgcaatcttccctcgtccgcatagctataatagttattgcctgccacaatcacatggtcaaccaaacggatgtctaatgtttcagcggcttttttaactgcttccgtcaagcggtcatccgcactgctgggcttgcgtgctcctgatgggtggttatgtaccatgataaaagatacggcgttataatacaatgcctgcttcatgataacccgtatatccacaggggcggtatttatcccgccgcatgagatacggactttacggatgagtttggacgaactgttcagcaacagcacccacatctcttcagtagctatatcgcacaaaacaggatgcatcattttataaacattattgctggataaaagcgcaggactttcaacttgcccttctttcagccgtttatatagctcaatcgccgcataagcgacttttttacggctgggtgttagtgtttccagtacatcagacaagcacaatccttctatttccatctgttcatacttatattcttcacgtttcagtttctcactgttcgtcaaggtataaatcaactcgctgttttccatcacccgataaacgtcattcacttcaaatacggttctcttcgttttcatactgccaaaaattaaaagattaatactcgcaaacatcgcttgtcgccccaaccataaatttttcctcaactgattgggaacagtgcattgaagagaaagcgggaaagacggatcagaacgggattgaactggtaaatactacctcccggaatgggaggatggagatttggcttttcaatatcgggcgttccggccacgcctaccttcgcaatgttcctatcagttcaggaaaaaatcatcatacctctcttccggcatagccggagcgtagagcgttagggatagcagggaaaagcctggagggtaacgaggacttgcaacgaatagcccggtcagaagggaacgccctgaaaaactaattcggatacagaagatgaacagaaccgccttccaatcatataaaaaagcgtgaaaatcaacacatacttccgaaaaatctttttccgaaagtacgtatagggcatgtgaagggaaaatttattttcccagtcatttctatgttatcgctttggggatatttaaaggggttaggagtttaggtctttattatgtattttggtggatggttttacacagccgataccttttatttaaaaatttctctcttttatttcactgatataccgacatataaaaaaaacagggattacctattcccttcattaacgggtggacggttttacacagctgacaagtgaaaccggacgcttttacacaactaaagcaaaaggagtggacggttctacacaactagaagcaacaaacgggacacttctacacaactaaaacaggcaaagcggatgactccacacatctaatcaccccaatagggacacttctacacaactaattctataaaaaaccgtgaaacgtggacggttctacacagctggatcgtccatgttcaccgccccgtccgtctccggagatatgaactcttcaggagcaggagcaacttccgttccattggcactctccaactcttcctgtgcccatccttccggaaacctgccgaatacagccacgaaatcactgatatatatctgtttcttcttttctacgctttccggggagtttgcccataaaaggaactctttatacagtccggcatcttcctccacctctttgatcttcttcctcctgacagccatatccgtgtccgggtaggcaatctcgacatacagcccaagcaggttcttatagaatttcttcaccacgacagcatattgtccttcatcaaaatagtgcagcgtatgcctaggaaacgagaacaacacggtatatgcccatctctcatgatcgcctttcacaaaagagaaattgaaattggtatatttcaggtaagtattcatctttttcagtatcgaggcgaccttctttttccggtctttgggttcggcaatctctatgccgagctttttagccagctgatcgactgtcagcacataaaaaggagcctcattcttggtggtcttatacttgatcaggtaaaccatcttggaaagttccagatagaaatagcggtaacggctgggcaggctacggtaatcctgaagttccaagaggttatagagcgagaacatgaaattctttatctccgggcttaccactgccgagtacagccttttcgttgacttcttcgtcttgaaatcggtcattatgtcgaaacgtttcaagatctgcacgaaattataggatgtacggccatcctcgccaatggtcggatagcagaggttctccaatcccagtttatagagagccgcctcaaaaaccgtctcgataggatggctgattctctgtcctgccgtgtcggtacatacatattccggctgcatattctttccgaacatggccgcgagctgccggctatccagcttgcgctgcaagttggtacggtcataccccatcttacggcagaagtcttctacggagaaccaggaagtcccgaacaagtctttgaggtgatagctgcccaggtatatgatcagatcgagcatgacatttccacctgcctcatacaaccgttcaatcagcacggaattatagctttccccaagcaccctagggacacgaatcagttcttttgccatgataatacttacaaaatcaatcctttctctgttttcattgccacaaagataggcataccggccaacatacgcgtcataattatcaatcagttttaacggtatgaccggtatgggaaaaggagaagtactttcctgaagaatgctttatccgcccttcatcagaaagaaagcatcttacacctgtaccccatagacatcctatattactttttcagttcttccgataaaaaggaacggtctatcaatacttgcaccaatggtttctctttgacaaactcatcaagctcacgctttatcaatttattgcccaaccctatgcgtcgtccaaattcctcgaaatccttccgccctacctgatgagcaatttgactccacattgtcatctgtaatcgactcaaccctcggtctaaggtgtagatcgttaggttatcagtacagcgaaatcatccgttctctcatgagtatctacttctgtggtggctcatgtattgaggatgtcactactcatttgatgaaccatctctcgcttcatccgacacttcatacttgtagttctgatactatcctcagagcgataaaggaactgacgcaagaaaacatctcatacacatcagatacgggtaagaactacgatttcaacacggctgacactctcaatactttactgctcaattgtatgtttgcatctgaccaactgaaagagggtgagaagtatgatgcaaagcctacatacaagaagttctctggttatcgccctggcgtggcggttattggtgacttgattgttggcattgagaatagcgatggtaacacaaaagttccatttcatggcacgttttctcgccatggcagagcttaagtaaacttagctctgctcatctggcttaacgaaaaccttcgttttcatcagaaggacacgctgaagaggttctttgagagatttgagcagaacaggctcactatcaatcgtttcagagctgattgcggatcatgttccgaggaaatcgtggaggaaatagagaaacactgcaagtccttctatatccgcactaaccgctgcagttcgctctacaatgacatatttgctctcagaggctggaagactgaggaaatcaatggcattgagtttgaattgaactctatccttgttgagaagtggaagggtaaagcataccgacttgtgattcaaagacagaaacggatggatggtgtgcaggatctttgggaaggagaatacacataccgttgtatcctgactaacgactatgaatcttccgtaagagaaattgtcgagttctataaccttcgtggaggaaaggaacgtatctttgatgatatgaacaatggtttcgggtgggacagattgcccaaatccttcatggccgagaacactgtgttccttcttcttacagcacttatccgtaacttctacaaggccattatccaaagacttgacgtaaagaggttcggactcaatgcaacaagtcgcataaaagcgtttgtcttcaggtttatctctgtaccagccaagtggatcaggacatcaaggcggtatgtgctgaatatctatacctgtaacaatgcttacgcagatatttttcagactgattttggataacgcctacaacttatgggtatgatactgcgtattgtctcaagtcgcattgtggggtaaggggatgttgtaggcagaagtgggtgtttctgcctcaatttatctgataattcagtaatgagaggacgtgtacacgcaagaaggacgttgaagggcttagttgcggatttgaggcaggtaagaaaatacaaagaattaacagcaaccgagaaactgaaataccgtatcgcagtgaaaatgacggcagccgactacttccgcctgctgacacgatcgcatgaggcgggcgtatcaccaagcgagtacatgagggaatgtttccgtaacggtcatgtgaaagaacggctgtcggaggaacatgccggatacatccgccaactctgcggcatggctaacaatctcaaccagcttgcgcgtaaggcaaacgccggaggcttccacgatgaacggtgggactgcaaggtggcagtggcaaggattcatgaacttataaccaagatagggatatgatggcgaaaatcgtaaaaggaagcgacttcaagggtgcggtggattacatcatcgacaagaagaaggatacgcagatagtagcaagcgaaggcttgtttatggaaaatctggaaactatcgccatgagtttcaatgcccagtcacggatgaacgataaggtgacaaaacctgtcggacatatcgcgttgagtttttccaaagaggatgagttacggctgacgaaccgtatcatggcaggcatcgcgcttgaatatatggaacggatgggaatcaagaatacgcagttcttcatcgcccagcatttcgacaaggagcatccgcacgtgcatattgctttcaaccgcatagacaacaacggcaataccatatcggacaggcacgagcgtctgcgcagtacccgcatctgcaaggaattgaccttgaaatacggcttgcatatggctggcggaaaggacaatgtcaaacgcaaccgcctgaaagagccagacaggacgaaatatgcgctttacgacatcatcaaaatggaagtcggcagatgcggcaactggaacgtgcttatcgccaacctgaaacggcagggagtggaagtacatttcaagcataaggggcagaccagcgaggtgcagggtgttgtattctccatgaatggctaccatttcaacggctccaaagtggacaggcgtttcagttattccaagattgacgcggctttgcagcacaacagatgcagggaacgtatgggaataacagccggaatatatgaaacggctacaccaagcgcaccgtccggcacggcacaaagcgagttgttcaacggctcttggggattgctaaaaagcagtggctcatcttataacactgctgatgcggaagccaatcaggaaatggtggatatacttcgcagaaggaagaaagttaagcgcaagagaggtgttgggttctaatattctgtactaatccaattctcacgacacttgcgctctatattcattcggagtgtaacctacctctttcttgaacagtcgggtaaaatgttgcgggtactgaaaaccgagattataggcgatttcattaacggtgtcgtctgtagatgcaagttccgtcttggctatttcaatagacttgtcatgaatgaaatgcagggcggttgaacctgtttcttttttcaataaatcactgaaatagttgggcgagaggcagagcttgtctgcacaatactgtacagtgggcaagcctatccgtttagcagccccatcatggaagtattcgtcaagcaaccgctcaaatcttgcgaggatgtctcggttttggttgtcgcgtgtgatgaactgacggtcatagaaacgtgtgcagtaatcaaggaacgtcttgatgctgtctgtgatgaggttcttgctgtgacggtgtatcggatggttcaattcatattgaatcttgtggaagcaatccatgatgatttgccgttcttccacactaaggtgcaatgcctcgtttgtctcgtaggaaaagaacgaatattcacgcattatccgcccgagaggtgtattccgcagcaggtcgggatggaacataagcaggtagccatctggttggaactgcatgccgtcatcttccgcaccgaacacctgtccgggcgcgataaatatcagtgtgcataattattcctaagtctgtgaaaccggaacgcatgaagcagaatctcgacatattagacttcaccctgtcggccgacgacatggcacggataaagacgctggataccgacaagcctttcttactcggctcgcacgaagatccagaaatcgtaaaatggttcatgcagtacaaaaacgcctgaacatcaacaaccatatttcgatagccgctatcgactatattaagaagttattcgtatatgcctttattgtaatccgtcatgtactgagtaaatgttttgcctgtttgctgtttgaagaagcgcatgagatggctcggatcagagaaattgaaatcatccgccatttcactgacagtgcggttggagaatagcaattcgttcttcagttcctcaagcagacgttgttttatcaaatgggtagctgatactccgaattgggcttttactgagttattgagtgtgatgcgactgacatgaagcatgtctgcatattcctgcacccgctggtgggtgcggatattctgttccaacaagtccttgaaccgaaaagcgaaattgtttttagcaatttcagcgggcaagcaataggcggcagcgtatgtacgattgataatcagcaaaagataatatagtaaggaaacaatgatattgtacgtatcggacactggattcatcagctcatacttaatctttccgagcagccgcatatattccttcatttcgtcatgtgtggcattgatgtaaggcggcgtatctgtctggtaacaatacaaaaggcgaaaaacgaagaacttgtcggcgataaaagtacgcatgaaatcttcgcggaatataaggaacgtgtaatccaacgccgtctcatctacatgccactcttgttgctgatggggtgaaagcaggagaaccatgccgtcgcgcagttcaatcttgcggaagttcagtagcaaatatccgtttgccttacggaaaaagtagaagctgaagaagtctgtcttaaaccgcttgttttctgtcagcacaagtccgatgtccttgtttatggcagtattgatgtaaaaatccacgccgcagcgtgtcttgttgaacggtacgctgaccagtcgatcagggttgattatctcgtccatatccttgtcgtttttgcaaagataataatttcatttatcaaaatggcataattaccgttttttcaggcatagatgtttcgccggattcttccgaactttgcacccgtaatcaataacaagacatatagtcatgaaaaagacatctacagtacaattggtgcgcaatgccaccttgaaaatcaggtatgcgggacacaccatgctaattgaccccgttttagccgacaaaggcactttgatatcggccctcggtgtgaataaaacaccgagggtacacctcaccattcctattcaggatattatcggaggcgtggacatggtgctcctgacccacaatcacatcgaccattacgagccgagtgtccccacacatttgcccaaagaaattcctttctacgttcagccccaggacgcggacgccatcagaaacgacggatttacaaatgtgatacccatcgaagaaataaaaacaatagacggcatatccatttaccgcacgaccggacatcatggtttcgggcagatcgggcagatgatgggacctgtatcaggttatgtgctaaaagccgagggcttcccgaccgtttatataatgggtgactgccgatgggaagcatgtatccgagacaccgtggaacggttcaatcctgactatatcgtggtaaactccggaggtgcaatctttcccgaattttccaaaacggacggtcctatcatccccgacgagaacgaagtgatgcagatacttgacgaattgccttcgcatatcaagctgatagccgtacacatggatgccatcgaccattgccagaccacccgtgcaattctgcgcaatgaggcaacgcatcacgaagccgacatgagccggctgattatcccggaggacggagaaacagttgtgttatgagtgtctgcattaaatccctgataaaaaacatgaacatagtggtagggtgcactataggatgcccttactgctatgcccgtaacaactgccgccgtttccacattaccgacgacttttccgtgcctgaatacatggaacgaaaactgcgcatcatcgatacgtcccgtcctcatgtgtggctcatgacaggaatgagcgatttctccgattggaagcctgaatggaacgcagaaattttcgagcggatcagcagcaatccccagcacgcctatatctttctgacgaagcgccctgacaaaatcagtttctcctctgacgacgagaacgtatggatgggcgtgaccgttacgcgcagttccgagaaaaggaggattgatgatttgaaaaagaatatcaaagcacgacactaccatgtcacgtttgaacctctcttcgatgatatcggcgagattgatttcgagggaattgactggattgtcataggcacagagaccggaaaccgaaaaggaaagtcatattcgcgccccgaatgggtgcttagcattgcagaacaggcaaaggctcatggcataccggtgttcatgaaagaggatttgctgccgattatgggcgacgaaagaatgattcaggaattgccggaacaatttaccagacgaatacaatgaatatggatacaataaaggaaatagatgtaaagagtgtaatgaccaaatcctctctgccggtgggaggatattcggtcaacccttatgtagggtgtccccacgcctgcaggtattgctacgcatcgttcatgaaacggttcaccgggcacaccgagccgtggggtacgtttttagatgtaaaaaactggaagccgataacgaatcctcataaatacgacggtgaacgtgttgtaatagggtctgtgacggacggttacaatccgtatgaagaagaattccaccgtacccgaaggctgctcgaagagctgcgaggaagcgatgccgagattatgatatgcacaaagtccgatcttgtccttcgcgatctcgacctgttgaagagttttcccaaagtgactgtgtcatggtctgtcaatacgctcgacgagcagttctgcgcagatatggacaacgccgtaagcattgaacgccgtctgaaagcgatgcgtcagacatacgaggcaggtatccgcaccgtatgcttcgtctcgcccatattccccagaataacagacgtaaaggcaataatagaggaggtaaaagattatgctgatttaatctggcttgaaaacctgaatttacgcgggcagttcaaaggcgggataatgacgtatatccgtgagaagtatcctgacctcataccgctttacgaggaaatttacaataaaaaaaggcttgaatactggcaggcattggagcaggacatttcaaattacgccaaggagcagggcttcccgtatcgtataaacgatctgccatacggacgctcggaaaaaggcaaacctgtcatcgtaaactacttctaccacgaaaaaatacgattgacaaaatgaggctatgccggactgatgcagaaaagttgtagcgcggataaaagcaccatgtatgtggataatatccggcaatcttccgagcgtatgcgggagatgctcaacacgctgctggatttcttccgtctggacaacggcaaggagcaacccaacctttccccttgcaggatttccgcaatcacgcatattcttgaaacggagttcatgcccattgccatgaacaaggggctgactttgatagtggagagccacaccgatgcggtggttttgaccgacaaggaacgtatcctgcaaatcggcaacaacttgttgtcaaacgccatcaagttcacggataacggtagtgtatcattggcagcggattatgataacggtttgctgaaacttatcgttgaagataccggtacgggcatgaccgaagatgagcaacaacgagtattcggtgcatttgaacgtctttcaaatgccgccgcaaaagacggcttcggattaggcttcctgcaaccagccgttatccaacagccgggttaaatgcgtcctccctatctcggccgtcccttgcaggacgacacagcggtctttctcctggagctttcttaattcctccagtgaagccgccattttctccgccattgttgccataaccgtttttatttagattctgattattttcgtgcaaatactcgtttttagacacgtgtaaatactcgtttttaattatgtgcatttactcgtatttgttgcaaaaatacaatatttgttccgataatcagctactaatgaagtctttttttacttgttgtatcgtcgaaacggcctttcccgtgagcttcgccacgttccggatcgagtagcctttctttaacaaggcgatcgcctcccggtattcctctttcctctgttcggccgttttccggcttcccggcttccgtcccagcctgccccctttctggatgtacaactcccgtccgctattaaggcggtcgatgatcccctggcgttcgatcgcggccagttcccccaacagggtagtgatcagagaggacaaggggtttaccgtcttgtccggccgtaacgtttccaggttcaggttttgaatatacacgcatattttatgcgtgtgcagcgtatcgagtgactttaggatctccagggttgaacgccccaggcgtgagatctcggtcagcaacaacatatccacccggttctgcggatctgtgcagtattccaggcaacggcttaaaaccgggcgttcgatattggcctttcgtccgcttatcttttcctcaaagaccgccgtcacctcgtacccccgtccggctgcgaacctctccagatcgacaacctgccgttcggtcgattgcctggccgactgcgagcttacacgtgaataaataaccacattcatcccttttgcttttgttcttccttatctattgttttaatcaccttatccacctctttcaaggaggcattatttccggatctatccaaaaaagaaattcgctaattaacctataattactatctttgcattgtaatgcttggtaaagcctctgttatcaaaacacgtaaccaagtcaaggatatacccgttcatcaagaacgggtttttcttttgcgacagcccattcataagacaaaggatattataacaggtcagtaatcacagccgccggaatatccagctttgagaaagcgaacatctttttccccagatcctttaacgaggctccgatatggtacacgtccgtttcatcaacgatcaggaaacggtcgtgactgtcccggtacgtcctgatgtcgataggtgggtactggctgttatgcctgtcaagatcaagttggagttgctgcgtgatacgctgggtgtaaatggtggccgagacaccgacgctgcgtttactcaacatgagcaagaccgtttcgtccacatagttgtcgataagcacgatcgaacgcctggccgactttaccagatcggtagcgaacttgtacgcatcgaaaatctggccgttataaaaaatgccttcgaccgggggcaaggcagtacgcacaaaaaaatctatcttctcggtatgttgagcgacagtcctttcaagttctgacaaacgtttattaatggaatacccttttaaaagatagtcctttaaaaccttattcgcccattgcctaaataaaatacctcttttactattgacacgaaacccaatggatatgatcgcatccaaattgtaataagtcagattgcgcatcacttgccgtttgccttcctgtcgaactgttcggaaatcccgaacagttgaactttcctctaattctttctgatcatatatgttttttatatgctcgcttatatttgctttgctggattgaaaaagatccacaatttgcgcctgtgtcagccaaacggtttcatcttccagcctcacttccaacctgaccgcttcatccggctggtataatatgatttctccctgttccattacttatttaccttttcttaattcatcaagcctctgcatcgcaccgctgaacttctcactaaacatcatatcatcgggcaaaacaaaccaggtgggaatacctctcgactgtggattacctatacattcatcttgcccgttctgtttgcggtaatcgtcccattcactataagcgatgttccaacgaatacctaatttataggtattttcccatttaataatagccagtgaataggccggatcatctttgccgtcataaatcacttctacaacttcaaccacccctttaggggaatttataaacttcggatttttatacgaataagtgctcatgtcttttattttttattcatagcacacaaagatactcaaaacaaatatatacatatatacatacgtatgattaacgtataaaaacatttatggttattctaatctttgattaattccggtacagaaacaaaacgtaccgaaagacggaaacaggatttatttcggtacgcttccccgatcggtacaaaaaacacgcaaaaaacgaaaatactacttttagtcttttagtatattagtattttgactatatgttgcggacatgacaaccatttaaaaaactgaatttatgagcaaagcaaaagtaatctccgtattgaatcacaaggggggagtaggaaagaccacaaccacgatcaacctgggcggtgcgttacgtcaaaaagggtacaaggttcttttgatcgaccttgacgggcaggccaacctgaccgaatcgctgggcttctctgcggagcttccccaaacgatctacggtgcgatgaaaggcgaatacgacctgccgatctacgagcataaggacggccttagcgtcgttccctcctgcctggatctctcggccgttgaaacggagttaatcaacgaggccggacgggagcttatcttagcccaccttatcaagggccaaaaggagaaattcgattatatcctgatcgactgtcccccctcgctgtcgctgctcacgcttaacgcactgacggcctcggatcggttgattatcccggttcaggctcaattcctggcaatgcgtggaatggccaaacttatgcaggtcgtccacaaggtgcagcaacgtttgaactcggatctttcgatagccggggttctgataacccagtacgacggaagaaagaacctgaacaagagcgtttcggaactggtacaggaaacattccagggcaaagtgttcagcacccatatacgcaacgccattacgctggccgaagccccgacacaagggcaggatatttttcactatgcccccaaatctgccggggcagaggactacgaaaaggtatgtaacgaactgctaacagaaataaagtaaccatatggcaaagaagaacgatttaaaaaacagtatgtcggccgggctgaccgggggattagacagcctgatccaatccacggccgggcaaaaagaggctcaaaagccgaagaaagcgaaaaccgtgcattgtaattttgtcatggacgaaacctatcaccagaacttaaagctgatcgcgatccgcaaaggcgattcgctaaaatcggtattgcaagaggctatatctgactacttggataaaaacagttccctgctataacagcgtatcgggaatatacagggcaaacactccacaaaagaaattctccaggaaaaaggtacgcaaaaagcacccctacacatcaaaaagtatattgaaaatgcgattccctataaagaacccgttggcgggattaatcttgcgtatgtttaacctgccaacgggtacgatattgataaactttttgtttaaggtttaacgtttacgttgctatttgcatcaacccagcctgttgtctctgcatcaaactggatcggattcaacacagcctctccctgatcagtataaccaccaccgaaaatcaacgtgtagatatgacgcttgcccgctacccatgtatctccgaacggaacataaattgttccgtaactatctgctgaacccaacagataacctccggactgctggattttgcaggtgatcgacaggtaacattgatgcgcaccgtcggcttttatcttggtattggtggcttcttcggaaactttccatgctgtcagcttctgtggtatattcagcataggagttttttcggaaatatcggtagctgtggtattactattgacctcgatgaatttgccttgcactacggtaataaaacctcctcctgtagagctttcaggccaatcacccacagcccaacttcccgttccatcggctgtcgcaggcaatgtgtagacgccgcccatttttacattaaaaatcttgatgtcctttatattcacctgcatgttatcgtattcggtctttgctttgaatacgacctgtgacagaatatgcttgaagttaaatttcactactccgttgttcttgtcttttgtctggcctttggctatggcatacatcacgtcgtagttttcatgagcattgataccagatccatactcatcggagcaggaataagttatcttttgagtatccttggtggcttcccacatataactccactgcatggcttcatcaaccgttccgggattgaatgcgtaaaagtccaaagcctcggtaggccaataacgaaggtcgctcgcatttttataatcccacttaccattattgtacacgatattcactccgtcatgtccaaaatccgtgtctacctttcccatgaaggcagtaccatccgccgtaaaagcgaacacgtcgaaatcggtgttcttcaagttggtgttggtagtaggggtagccctcgtttccgccgcattacttaacacgttaaaaccaatcgcattccgtgaggaggtttccacattcgcaatctcctcgtctgagcaacccatgagtagagctccaaagattgcccaaagcattactgtactttttttcataaataaaaataaatcaaattgatacatataattaataaactcatattacaacactatatccatattcacatcatcccaatcatcaacgtccacatcaaatcccgcaccgtcacttcccggctcggatggaacctcataatcaaaattcaacaccagatgcacatcaccgacatgccccactaccgggacatcatgcacttggccgctcacgtcctgttccaatacagacatgctgcctgaacggttcttgagatacaaccggaaaacattgggctctccttcaagtgcggaatgtccaaacgtatagaatccgcctataatctgattccgtgaaaccattccatcaaagagcaggctctccgaaagaccggcgggcaaactgtcggcggacatgttaagcgagccggacatgccggaaagagcggcccgcaaatccgccaccctatccagtccccgaagaccgttcacctcatacgtgtagtgacataccatgtttacgggagtcagccgtactatctccgcgcttcctcccggaatgtccttgaggataacttcgtctatatggtcgccacacagccaaggtggggtgacagccattgtccggttatccggcgactgcacatcacgcgtatcggcagtaaaaagcgtgtaactgccgttttctttccaaaccatcccgtcggtatcgtagttgaagcaaattacccggtaatcattctcgggaagctccacttccccatcctctcctccggggaaatcaaatatccacgtgttgctttcatcgtcggtcggataaaatacgaccctcatgccttcaggcttgtcatgattggaaatcttggtccagtcgaatattacccgcaccgtggcaaagtgcggatgatcgtaacataaatccttatgctcacaagccgtcagtcctatccataaaaatatgaacaccagactaaagcgtatccgtatcactgcctgcctcctttcttccggctataattcccccgcccgatcaaccacaccaaagagatacccgccttggtcgggccgaaccagcggcggtttttagtggtctgccatacatagtgaccgtccaaagggatgtactccttgtacgatcctccaaggtagccgattcccaacgtgaaatccacattgaaccgatgtcccacaggtaacgagtagccgtaagccacgcctcccccgtaactccatttatcccccaagtaacctttcccacccaattcgaaatcataggtgacgatctgcccgtacaatccgacatgatgcccggaaaacggtttttccaccgctctccgaccgaaccagcggcgcaactccacatctcccccatagatacgccaataattatgcttccgatcacttttccaccaggcatacatccaattcccggccacagaccagttcttccccaaacagaactcaaccccgatgtcaggtatcaaaacagcgtcataaagcaagtttgttttcaccgccatgcaaaacggccgtttctttaccggagctatgacggtaacggtatcacggatgcacaacgtatcacgtgtatgtatatataccgtatctctgacgggatttatcggatcactatcatagcatattttcaccatcgacgaacgaagtttcggaaaatggaatttatacaaatatgagtatggcctcccccctttcagtcttttcagttctccccccaaataagggctgtcctggttttccaaacggacgatcttctccaacaaacgaaggacatcctccctctccggaacattcacatccgctctcaccatcgttataagtccgttccagtcgcttcccgaaaaatgaaaatccttctccaataccggaatctttatataaggtgatatataccgccacaaaacctctgctcgtttttcagacagccttccattcaacagcccccctccttccggggaagctcctcctattatttgaattttcctgataagacggacggagtcgttcaatgcggaacagattttagcaaaccgctccatctcgttcccattgtcaagtaaacatgtatctatatttacctttccttgatgaaaatagatccttaccgaatcacgcttctcctgagcggatatttctccgcttatactcaacacgagcacgaacaatacacatttaatataaaaaaaacatcttttcgtcatttaatcatttgttaatatgacaatccaaacccaggcttttacaccccctgaatttcaaccgctaaagatatgcacttataaaccaacctccaaagcaaaaaacaagtattttaaacttataaatacttaaaaagacaaccacacaacagctacaacacttaccacagcagccaatcacgcttacacaacaattaaaaacacttaacatcataaagaaaagtacttaaacatacaaaaaaaaaaaaaaaaaacagttatttttgcaggaaacattatacttaataacacttaaaacaataaaacacatgaaaatcagcacaaaagccgcctcttttctaagttcaataaaaactcaaacttacgacaaaaaagaaagagaaatgataataacgtatcaacaaaaacgagtctttcatctatccctgctcatgctggtcttatgcgcacccatatacatatattcagttccatttcccaatgaacagttttattatattaacagcgtattattcctgtttatcattatgtgcactctcgcttattttaaaaagagagtaaatctgaccacgaccttttccattatactgatagccatacatatcgagatttttatcgaaataatttattgctcaatatgtagcggatatgaatatagttatcaaagagcattgataatgagtaacattactatctctctcttatttaccatgctttccatctgtgcctatatgagtaatatctccatcctattgtcctcccttaccatagcttcctatacaatctgcacacttatcaccgacgaaccgttcctatacagttatctgcctttgatcatcatcatatacaccatgatccccttattaggaagatccttacacagtaatatcagcagcttgctaaaaagtagcaacttgctaaaagaggaagaggaaatgcttttgaaacgtctccaaatgaaaaaggaagaactattcgcgttcgccgagttgttaagcgagaataacccggaagaaaagacaagctccctgttaaacataataggggaacaatccaaagaaaatctttttacagcccttgccgcataccagaaaaaggaaaaaagtaaacttgatacaatcaggagaatatatcccaatttatccccgtccgaattaaacatctgccgtttaatactgcaagacaagaccgtcagccaaatatgcgaattattacatcggagtagcggaaacataaccagccaacgagcgaacatacgtgccaaactcggactgaaaaaaagcgacaatttaaaagaagcattacaagaacgcatgaggctgtatgaagaagaagaacaccggcaagaagagttttcagccatgcgttagggattgcagagtaaagcccacagcctttaggcgaggacttgaaacgtaaagcccgaccgtcccacaggaacgcccaaaagaaaaagaatcccccgaacattcatccgggggacatccaagccgtcacatcaattataatacagattcagatcatccgtgccaatctcctttccgtcccggaaaacaaggcgtaaatcaatcctctctctgttttcattgccacaaagatagacataccggccaacatacgcatcatacttatcaatcagttctaacggtatgaccggcatgggaaaaggatacacctatattgcatatagcggaaaatttgtaagattaccctgtactttataaggcaacatagaaaatctctccgcatgcaattccggtctttttcccagtaatgctgtcaacgaattggcccggacattcccttcggccttcacttctatcggcaccatttgggcattacgttgaataacaaaatccaactcaagacgcgaattgtctgtgttatggtaataaatcggtgacacgcccttacttttcatctgctgcaatacatactgttcagtcattcctcccttgtattccttaaatatgtcgtttttaatcaagacttgggccggatctgtcttgaccatagcacccataagccccaaatcaaccatatagagtttgaaagccgacaggtcttcataaatatcaagcggaagctccggtttggtacatcgaggcactttatacaacaacccggcatttacaagccattgaatggccatctcaaaatcattggctctggcaccttttcgcaaagctccgtaaatgaatttcttgttttctttaaataattgggaaggaatgctgttccataccattcggacacgcggaacctgttctttgggcgcatgttttgagaagtcaagatcatagccttgcaaaatctccgactgtattcttctgacttccagcaaggaatccgtttctacatatttgagtacaacttccggcataccacctacataataatattgccgaaggagatccgtatatttgtcatgcaggaggcttatcgtttcaaaatccccactcataagcaatttacaagcttcttcttctcccttggcgacaagaaactcttcaaagttcataggaaatatattgatgacatttaccttccctacgggataagacacatcctgatgaagggatatccccaaaagtgaacctgccacagctatatgatactccggaacctcctctttaaaatacttcaaagattccagtgcttccgggatatcttgtatctcatcaaggataataagcgtatcacccggagtaatgtcaacggaagtcatcgcacgcagcccccgtaaaattctgtcaacattgaaatcctgagaaaaaagctggcgtgcaaggttattcttacggcataccacataagcctcttttttgtattcaagtttggcaaactcatggagcagccatgttttcccaacttgtcgggcaccatttaaaatcagaggttttctatcctcacggtttttccattctataagttgttgcaaaacaaatcttttcatctacaaacagcatttttatacatgtaaaaacagcgtataatacatttatccgcacttatttaaagcacaaatatactaaaataaacagataatagaagcaatcttatacatttttccgcactttaatcaactccaatggaaagcagtagccaatttaggattgccttctccacgctcgatggccaccagcgtattgatgcccacgcccgccagttcggagaagttccagctgattgaccttcaaactcttcctgcactctttaatcatctttcctagctctttcatattcacaacacattgtgattttagtcagttttcatcctagttcaaagaaaaaaacagccgataaagcaactataatcattgtattcatatagattaacatcatatattcaagttaatctatatatttacatggattatttgtatatttgcaaaaaaggaacaaccatgtggaatgaaatgagcaatccagctgtgctgatgagaatcggccagcgcatcaaagagacacgtatcaggcagcatatcacgcaggaagaactggcaacggcttccggtgtaagccccttgaccgttgcgaacatcgagaagggcaaatcggtatcgctgctgttgttcatcagcgtactccgctcgctcggcctgctggagaacctggagcaactggtaccggaaatccgggtcagcccgatagagctcaaaaaactgcaaggaaagaaacgctaccgtgtacgccatttaaaacaagataaccatgaatgatttgatagtagatgtaaagctatggggagaaagcgtaggctctctctattgggaaaaggaaagcaatgccgccttgttcgactatgaacggaagttcatccgctccggtcttgacatttctcccatcatcatgcccatcagccagtacaggaacaccccctaccggttccttgaaaaccgtaccgactgtttcaaggggttgcccggcctgtttgccgattcactgccggacactttcggaaaccagatcatcaatgaatggtttgccagcaagggattgtccggagaagagattacccctttagacaggctttgctatgtaggcaaacgtggcatgggcgcactggagtttgagccgtcctcgccaatcaacggcatgaacgaatcatcagtgctccatatcgaggaactgactgagcttgccaaatccgtattcacggacagaatggcttttcaggtccaactgcgccaggaaggaagaaacattctggatatactgaaagtgggaacatctgccggaggtgccaagcccaaggccatcatcgcctacaacgatattaccggagaggtacgctccggacaggtaaaagctcctgaaggattcgggtattggctgttgaaatttgatggcggcaaatacagcgaacacacgcagataacggacaatccacaaggaataggaaatatcgaatatgcctatcaccggatggcaaaagcctgcggtatcgatatgatggaatgccggttacttcaggaaaaagagtcatatcactttatgacacgacgttttgaccgtatggaagacggagagaagatccatgtacagacattggccgggcttgcccactatgaccgtgaccaacgccattcatacgaagagatattccgtatcatgcggcagatgaacctcccttatccagagcaggaggaactataccgaagaatggtgttcaacgtcatgagccggaaccatgacgaccatagcaagaacttatctttcctgatggatagacaagggaagtggaaactggccccagcatacgacctctgctactcatacacaccgggcggcaaatggacgaaccgccaccagctgtcactcaacggcaaacaagacaatttcacgatggaagatctgcaaaaggtaggtgagaacatgggtatccggaaacacaaacagattatcgaagagatacaggaaaccgtatcgcattggcatgagactgccaaggattgcggggtcaagccggaacacgccgattttatcggagaaaacctgctcttgttcggcaagcaactgcatacgatccatatgccggacattgccaacgaacaagagcaggctttcatgaaggctatgcgaaatgatgacttcaataccattctgaaactgaagatgagaggatatcagccatcggagaacacactgaaaagcctccagccggatgtatccgccaccaccttcatcgctgccgccaaaatcttccaaatggaagggatgctaaaaagccttcaggacataaaacccgcgcaaagcccgattacaggcggcaataaacgtagcatggaattgggggattagcacacaaactacatcgcgcacaattcaatataacagtaaatatattaattgttatatatcatattttgatttaacaattaatatatttacctttgtaaaatgacaacgaatcacatcacccaagccatggccaatccggaaatcatagtggaactgggcagacgatttaaggaatacaggctaacctataggctcacccaaaaagaggctgccgagaaagccggtgtcagccttatcaccttacgccagtttgagaacgggaaggcctataacatcaatatgggcaactttcttgccctgttacgagtagtggactgtctggaacagatggatgatctgatgccggaaatacctgtttcagcctatacaatggaacgaataatgaataaaaagccgaaaaggataagacatggaaaataatgttgtgagtgttatgttatggggagaagaagtcggaaagctctattgggacgaaagaaacaaaagagccgtcttcaactatcatccggatttcatcaagaaaggagtggaaatcgccccactgaccgcttctgtcaaaggaccggcggcaaagggtatgcccatactcggaaacaaagaaaagacttatcaaggtctcccaccgtttttggcagattcattgcctgatcggtggggtaacatggtcttcgaccaatgggcggcacaaaaccatatccccaagcgcaaactcacaccggtagataaactgtctttcatcgggaaacggggaatgggagcctttgagttcatcccggccactcctggattggaatcctcttccactctccagatagagagtttataccaactggcacgccgtatctttgaggaacgggaggaaatatccgtgcaagatgacgaagcactgcaactgcaaagtatctatgagataggtacatcagccggagggcagcacccgaaagccatcatcgccatcaatgaaacgacacatgatatacgttccggccaagtccctttaccggagggctatacctactacatattgaagtttgcagaaggggacgattttccgttcacgcaaatggaaatggtatattatgagatggcaaaggaagccgggattacgatgatgccttcccgactcattcaaattgagggaaaacatcacttcctgacggagcgttacgataggataaacggagagaagatacatacacagacacttgctgccatgaatccggatgcaacgagctatgaggatttgtttgaagtctgccgaaaactgaacatcccggcaagcgaacagtccgaactctaccgtaggacggtattcaatatcatgggcggcaatgtggatgaccacatcaagaatttctctttcctgatggaaagaaacggcacatggcacatcaccccagcctacgacatgacattcaccaccaatttggacggtgcggcatacgaaaacgcacactccatgagcattgcaggaaaagataacgacatcacggaagatgacctgatgcaatttgccaaacagaacggaataaagaatgcgaaaaggataatcgaagaagtcagccttgccatcagccatttttacgattatgccaccaatcatcaaatcgatgactattggaaagaccgcatcgaagagcatctttccggtttggtatctccgatcatagggaaaaccatgaaacactacctgcccaccattgtcgaaccctacgagacagaggatggctttttggtatcagaaatcaacatcatcgaaaacacccggcatgatttccgtatcgaggccttcataaacggaaagcgacagaaatacattgccgggcgtaaaagcgatttggctgctgaagtcattgccaaaggcagaaacaagatgcccgttgagaacaagaaagaacttgtggaacggttgttactgcctttagctagaagataaaaacagacgaatagcgacactattacattaataaaaagtctgttcttgttcggcaagcaactgcatacgatccaaatccggacattgccaacgaacaagaggaggctttcatgaaggctatgcgaaatgatgacttttcaataccattctggaactgaagatgagaggatatcagccatcggagaacacactgaaaagcctccagccggatatatcctccaccaccttcatcgctgctgtcaaaatcttccaaatggaaggggtactaaaaagccttcaggacataaagtctgcgcaaagcccgattacaagcggtaataaacgtaacatggagcaaacaaatttactattcaattttcagtttttttctatttctatactactgtacgccataaaataacgaagaaacttattcctatatcaattcataatcaataacatacaattcaccaagaatattagggaatgctacagtatcatatatcacctgccctactccattaaaattacccggagatattacagatgctacaacaccatgataagctgtgggagaaaaagaaagatctgctaatccatttatcccaataacatttttctgtacaccagcattattaacattacaaaaaattgcataatgaatagtttgatgtaaatttacagcagcattaggaagatgcacaaaatataatatatctccattattacatttagctaaatcatgataggtatttattttttgtatcatactttctaaagaagctccaaaaggattaactgaaattctttttcctgttgcctgttctataattcctctaactaaattagcacaccctccaccatttgtaggtaaattaacattcaaattctgagtattagtaataaattgtgtaatcaattgtctatcatttatacttatagccatatattataactcatgttctcctactctctcaaaggcttttcggaacctgcctataaaaactgtctctgtaagcttaccccacaaatctaccctataatccccaaaccgctatcatcccttttctgaatgccatggaattttttccgaatacataagttagaagatgaaaaaagattgtattcaaagtttttggttcttttttgaaaaaagaaccgctggccaaaaatccaacggttactttactttcggaaaaatatgcaatgaagtttataggccgaatgaggaacgcagcttcttcatggcattctccacatcaaagaaagacacatccataagatcttctccccatgcttccggaaagtcaagaatggaacgtccgttattaagaaccgcatcacggatggctttcatcacattctgccgagtcggttccagcttgaagaaaaggcaatgcctgactgccattgtaagggtatcatcatctataaagaaacggatggtgacggtcatgtgtacctgcgtccgtttctccagtttcttctttttagtttccagtttggccaaccgggaaacatagaatgaagggatatgtttcccggattcaacgcaagtcttcatcgcttcatgtatttcagcgatgccgtcacgtatatccgtcaagtcggtgcagttggatgcaaccgtataagccgataactttttcatctcaaaagccgtttttatatggcaaaagccctgtttgtgaaacttataatatatgaatctccttatcacctaccttctcgtccgatacgaccaatacctcgtacttcatcctcttgtaattatagactacggcaagcgtattaaagccaccgttatcataccgcctgtcataaacggtatgtacatactcatacatcgcattccccatcatgaactttacggaaacatccgtaaagtaaaatgccaccgcataagccagcgttttctttttatcaaccttttttgttttcataaccatttgtcctttattgttttctgataaaatattcaatggccgaatgaaccaatatataatgtgtgggtgtctgcctgcactgttccgcataaggattatagaactggagagccagcgcatggtataattccggcaattcccgcttgattctcgccgtaagcagccgataggagcattttctaccgtacttcatcagctcacgccatttgtcctgtgttatttccgtgcaattcgtctcgtaaaccataacttccgtttttaagttcaatattccggttggaaagcggaaaggggttgttccctctccgtttattctctaatcaattcaggcaagcttttaccgttataccggttttcagtcctttatccagctgcacggtcaacccacgaacattcacctcttgaatttgagaaagaagcacataaccccattcccattcttgaatatggcaataaccgaaaaaaagccagtcaccgtcttcctgctgttcggcttccgttaccaaccataccaccgaagaaaaaggaaggaaaaaccttgcgatgacttccgcattaagcccctgcccctcttttgagtacaaagggttggcttcaaacacattctttagttgttccgtcactgtaatcatatgtcacatttttaaagggttaaacttctaattttatgcttcagctagatttaaagacctttttttaaaacccctttccgggatgaccttttctttctgccgactttttttttgagctttcatgccccatctgagtttataagccttttttttacggcacacaacaagaaggaaggagggattgagaaaagttttggacgacaaaaaatgttggggacagcgaagccgtccggcgttatttttttcggtacaaagggcgaagaccggaactctttcgtatccatccaccgaaataaatttgccgttcaaaaacaaaggctctcagacggggctatgaaaaaacgtacattaggggaggcagaaaacaaggaaaagggcagtacggaaataaaagaagaataaaatccaacattattcacattgatatataatagccaagtatttcgccatatcaatataaatccaactataatcaaaatcaaacagttatctaatttattggttattaaacatataatacgccaaaacatttattttggagaatataatattaattaaacaaaaaaatggcatcattaaaaataaagtatcgacattcctctatagaaggaaaagcgggaacattgttctatcaagtaattcataatcgtgtagcaaggcagataaattcaggatacaagatttatcctgacgagtgggatattttcaattcccaaataatcataccagcaaagacaggagaaaaccggcatcggtatttggtttctttaaaaaaatgtattgaggaagacacctcacgtctaaaagatattatgataagatttgagaatcttggatacaaatatacggcagacgaaatcattgaatattattccgctcctcctgtgaacgagtactttgtgtcattttgtgagaatctcattgaagaattgagacaaataggtaaaatacgcaccacagaaacttataccactacgctcaatagcttcaagcgattcatgaatttcagaaagaaaggcagagacatccctttcgacaatatagactccaacctgatgatggaatatgaacaatatctaaaatctaatgacatttgtccgaacagtacttcctattacatgagaaacctcagagccatgtataatcgtgccgtagaaaaagaattggttatacagcgatatccgtttaaacatgtatatacgggcatagataaaactgtaaaacgggcagttccggccaaaattatccgacagatacgcgatatggatttaagtcacgactcctctttggaatatgcaagagacctatttatgttcagtttttatacccgagggatgtcatttatagacatggcttatctaaagaaaagtaatttgcaaaacggttttttatcatatcgcagaaaaaagaccaaccaacagctagtaatcaaatgggaaaagcccatgcaagaaatcatagataaatacgataccataggttcttcttatctattgccgatcattctcgacgcaaaaacggatgaacggaaacaatacaagaatgcagcccagctggtgaattcaaaactaaagaaattgggaaaacaaatcggccttcctattccgctgacgagttatgtggcacgtcacgcctgggcttctatcgccagaagcaaaaacattccgttggctaccatcagcgaagctatgggacatgattcagaaagcactacacggatttatcttgcatcgttagacacctccgtagtggataaagcgaacagtattattttaaatacactttaattcacattataaaacagtttacgccataggtttcagcatacgtgcccaatcggcccgctgttattctatggcaattattatttttatttatctgacaaaaaataagttggaattatgttatacaaattgaagttttctttctgagagaaagatttgtaaacctgaattcaaacagacaatgcaacagtgtcgaattcattgttagttaataatttatatttttcctttggggtcatgtaacccaatctttttctcggtcttgagtttaagatgttttgaacgcgcattacctgttcattggttatgtccctaaagtccgtacccttcgggaagtattgcctaatcaaaccattgctgttttcattggctcctctttcccacgagtggtatggttttgcaaagtaaacaaaaatatttagtttacgtgcaatttcttcgtgaaaactaaattcttttccattatctgccgttattgtatgtatttggtctctaaaaggttccaaggcatcgatggcagctttagttagcgggctggcatctttcccgctaagtagtcttatccatactagtccagttaccctgtcgtttatagttaatagtgctcctttgtgattcattccaatgactgtgtcaatttccaaatcaccaaaacgtactttcttgtctactatcgtaggacgcttgtctatgtccacgcggtttttgataaaaccacgtccattagtcaatgcacctctcttcttatgacttcttccccgtcttcttaaatgcttgtataacaacttatctccatgctttttatcttcccaaatatactggtagattgtctcatgagaaactgtttccaagccctttgttcgcataaacccagtcacttgttctggactgaaatctttctttatgagtatatctacttgaattttcaagtcgtccgtaaacttcacgaagtgctttcgtgaacgcattctggacatatacttagcctgagcgagatccggtttgtaaatgccattacgtttatcactattacgacgtaattcacgacttatagtgctacgatgaactcctacaagattggcaatctcggttcttgactttccgctttgcagataagcggaaatgttatacctttgttcttcggttagctgtttcatattgcaactgaatgttggggaactggaagatgcaaagaaacaacttttccacaggggaacaaaagggaaagaaatcttctttctctgttcctctgaaaaattattcttttcgtatcttctcattgtcatcattctcactcctgttgcattatccgcttgaacttagg

SEQ ID NO: 164 - DNA, 49244 bp, Phocaeicola dorei
  source 1..49244: mol_type = genomic DNA
ttcggcagtctataaacctaaaaccatttttaacaaaaataattgtcctattatttgcgacatttatagaaaattactatctttgagtattgaaaataaagagataaataaacttttaaagctggtttggctgccagtataaagaacagcaaacaaaatcatgaatatcttaagatttcttttaagtagctttttatgggctatgggtggaatttttgtattagcaatctatgcgtatagtgaactagtctatttgatttttatttgcattgcaatagtaggattaaccatctactacagaaaatccataataaaaatgtacgcagaaatctttaatgagttaggaatcaataagtatgttatacaaattaaaaatctaaagaaatacaaagaacctatttacaaactaatcaatacaataggtctatgatgattgttttttctctatctttgctaaagacatcagcaagatagctatataaaattagaaaataaatagttatggaaactaatcaaacatatcaaaatgaacttggttcggctatgctcccatttgttatgagagaattggttgatacagtcatgaaaagaaaaacgctacctttagaagatgcgttatactatatatattcttccaatttgtacaaggcattattggacgagaacacaaaactatggtattcaagtacattatcactttatgaagcattagaaaaagagaaaacagaacagaagaaagtacaaaaggacaatccaaagatattgctttttcaaatgttttgtgctgaaaattacagggaaactaaaaatataagtgctaaagaaactcttttgctgttttccaatcatggcgtttttgaatttctatatgaaaattttgaaatgctgcacacacaagatacagagtatatattagatactataataacttatatcaataaaaaggcatgaaactatatcacggctcaacagttaccgtcaaatcccctaatatacagaaagggcgtaaagctactgactttggaaaaggattctatacgacaactaattttgaacaggctaagaagtgggcaatactcaaaagaaatcgggaacatggtaaaaaagcggtcgtttcagtttatgaagtccccgataatattcttgatagagagttttcagtccttcgatttgatggggctacaaaagagtggctggagtttgtagttaataaccgcagaggaaaaggaaaaaacagctatgatttaataatgggacccgttgccaatgaccagttatatgcaacaatccggctttatgaacaaggtgttgttacggctgatgcagcgattgaaatgctaaagacccataagctttttaaccaactttcatttcatacagtgaaagttattccattattaaaattcacagaatctattgaagtataaatcataaaactataatgaaccatgaataaagaaatgagcttggatgttgcgctcgacattatcgggacactccgcatgatgaagatagatgaaatatcagaagagaaggatgaaaacagaaaaaaaatactgcaaaaagaactttctgttctcaacacagaagaaaaaatagcaaatggattgttgcagtttgaagtttctgaaaatgtgcgcttatcagtcatggataagatacaaaactattacgcacctaaattgaaagcatattatgcaacgctatgaagtagaagccatctttgaacaaaaaaaagatggcttatttgaggacatcaatatatcatcacaaaagcctattgctataatcttaggtggacaaccagcttgcggaaaaagcactcttataaatgttgcaaagaaagaccatcctaacttagattttctcactgttaatggtgacctttacagacagtttcaccccaataaggaactaataaaagaccctattaaataccccattgaaacccagattttttctagcgtttttacagaaagactaatagaagaagccattaaacggaaatgcaatattattatagaaggaactatgagaaatccagatgtacctttaaagacagcacaaaaatttaaagatgcaggatttagagttgaagcatatattattgcagcccccaaggagtttacccaactaggactttacaacaggtatcaagaagaagtactaagtaaaggacaaggacgattagccgatattgattcacataacaaagccgtaaatggactaatgaaatctgcaaatcaattatacagtgataaggctgtagataagatttctatccacacctacttagcgaaagaaagaattaaagatttcaatctagtaaatggtgaatggagttgcaaaagtatgccatctatttttatagatgaaagtcgttcaaaacagatgaagaataaagaaatacttaacactaacattcaaagaggaaaagagcttattgaatccgtaacgaatcctgaagtaaaaaaaggaatgaaagaagctctgtcacaacttcaatcttcactagaaaaagttcaaagacaagaaaaaggattaaaaaaaggtttcttctgattcttccaaaaagagaggactggcttttccaatcctctttttctatttatttgcgtcttaactcattatctatttgctgtgaaatttgtcctttaacggttctgattacctcattaatataatcaagaattggcttagggtctatagttttatctttgtattccatttgaaaatgtaagtgttctcctgtgctgcgcccggtacttccactaatgcctattggttgcccagcttcaacagcttgtttcgcatttacaagcacactgtataaatgcccatagatagaagtaaaatcaccatgacgcacttctacataattgcccaaccctttattttttcctgtttttacaaccattcccggcattatcgaataaacatagtcgttgttgcctttaaggtctatccctctatgatttgctatttttccagtaaatgggtcttttcttttaccataatgggaagttatcaccattgaatcaatgggcaaagataaataccttctttgcttccagtatgcaagtcgttctgtagtcaaagcatcattgacgacaacagccttttctttttcttctatcaatttattttctgtcgttgctaatacaggttccgctttaggaatatcctttttctgtaataccgtattaaactgacagtagccattcactgaaaaaaacaatgaataagtaaaaaacatgataaatttattcttcatattgatatttttattacttttgagcaaaaatatacattacatggataaaaagcaagctatttttaatgaaaatgatattccatataaagaattagaactaataggaatatcaaaaaaacagatatggtctttggataaggcaaatatcacagctctattatctggaaagagaaccagtttactagacctttcttttcacgataataatggagaagaaataagtatgaaaggaaaaataagtttgtactggaaagatagcaacaatgctggcgttaaagttcatccagtcagaccagaaataatgaatgatataaaccttaaaccaaaggagttagaacgacttcaagataacgagataataacaaaaactattaacaatgaaaaatatctcgtacaattagaccctgaaacaaacgaattgcttaaaacaaaaatcaaaagtatttcaataccttcaaacataaaaggtgttgagctggataagcaacaaaaggaaactctaaaatcaggtaaggaattaattttgaatgttgacaaagaaaaaattgccataagattagatttaaataatccaagaggaataaaattcctagacttcgagcagaaacagaaaatagcttatgaccggcataacccacaaattataggaactattcatactgataaaaacagaaatgaatatatagaatacatgaaaggacaaaaaacaacacttggaaatgaatcgcaatctaaagtagaacataaattcaaattataaaatggaagaaaagaaaaaatttgaagctttgcaatatagttatgaaaatgccggacaattccgagcaatagcagcaattcttggatattcagaagaatatcggaatggtgatattaccttttccaaaggtaatgaaacatatacttatccactgaatacacttaaacttggcaatttaggagataatagagaatctttattagagcaatctaaagaaagaataatcagtttctttgataaagaacaagctagcaataatttccaagaatatagccaatatttacgagaaaaccacaatgttgcaattataaaatgggatgatataaaacaaggtactaacaagaatgaaggatataaagacggatttacagtcattgaccttgaaaataaaattgcatataaaggagaagacctttatcgatatgcttatgaacaaaaccaaaccctagatggtaaaggttcatatgttgatatagactggaacaagtttaatgaagtaggagttaaaccggaaaatttaagccccgaagatattgcaaacatcaaaaatgggaaaaaaacaggtatgctaaatttttccattgaagatactcccggtaatagaacacttctagacaatgaaaaagtgtcttataaaacagaaaatggaaaactccattttgaggggaaagcaacaactcttaaatatataacagccgagaatacacctgaaaataaatctaaattaaaaaccaacgaaattgatttcaaagaagaaggtaaacgcatcaaaattgatggtatcaatgctagaaaactagcaatcgcagctattacagtagtttacccaatcgctgggattgctatcttgctcattcctaaacgacaagaaataaaaaatgatttatcctttactaaggatgaaataaaagccctaaaagctgataatgtcgtagtaaagactaattcaaaaggagaaagaacattgcaccaacgtgacaaagatactaatgagatagtatcaataaaagcaaaagacattcatattccccaaaaacttggaggaatagagcttactcctatgcagcaagaaaatctcaaaaatggaaaagaaattaccattgtaaacgaggaactaaacaaagctgcaaaagtaaaactagatttgaatgccagaaatggattatcaatcaaagatgcaaatactatagaaattaaagcgactgaaaagaaagaacaaacaatagggaaagaaagatatatatctgataaagaaagattagagtttgtagcccaaaaaggagctaaagggattgatgaaatttttaaagataaacccaccgaaatggctgcctttttagagaaacataaactttctaaagattatgcttcttacaaggaagtagaaaaaacatattccagctctagggaagctactaaacaaactgtcggagaacaaatatctacccaaatggataaaatagatagttctattaaagcaacagcgaagcaagaagcatctattctcggatatggtagaacctacggaaaaaataatgatactccaacaatgaaactataatattatgctaacatttgacgattataaggctaaaatatccatcattcaaatacttgaagatttaggatataaacaagacattagcaaaggaaaggtttcgcctgtttttaaactgacagacggagcaggtaacaagttggatgaaatcatcatcaagaatcctcatagtgtacaagaacactactatgataggaattataaaggtggagatttaattcagttcatcaaaaatcatattaacgacttcccacaattccaacatcaaaatacatttgtgcgaatcaatatgattttaggacattacgcaaatgagccttatagtcctaaatatgaagcattcaaagttgtaaaagcagaaaacaaatcttttgacagagatagatataaagaatttcctactacactcgctgatttaagatttctcacaaatgaaagaaatataaatcatcaagtcgtagaaaagtttctaccatttatcacaagggttaaagacttacaaggaaacggcaattattataatataggttttccctatattaatccaaaagataaagacaacaaagtaacaaattacgaattaagaaactatggattcaaaggaatggctgccggaggtgataaaagtaactcgctttggattgctgatttttgcccacacccccaaatggcaaaacatatatactttgcagaatccgctttagatgctatgagcttctatcagctcaatgctaacaaaatcaaattagaagaaagtgttttttgtagtgtaggagggtacatttcagttaatcaaataaaaaacactttattgcgatacccacaagctaaagtacatacctgttttgataatgatttaaacggtaatttgtatgacattaaagtgtctggaatcattagtaatacagaaatgacaataaaagaaaataaagatgatgtgctgtttaaaactaagggtagagaattcactattaacaaaaatgacgtttcactagaaagttttagggaaaaaagcaaaataatagctcctatgatttctcataaagcagaaaaagcaaaagatttcaatgaaattctaatgaaacaacatgaacaaaaaaaaagtattaagttatgaatgatggaacaaacatagcttctgatgatattatattaaagcctaaattccgatattggttaatgaagaatttccttttaatcacattagcgattttcgtattcatttttagtaaatatataagagaacatgaattattaaaatttatcagtggaacgatattagtattgttgatatttataattttctacagatatatttcaatgttactttgtacaaaatggattataactagagagcaaataaaaatatatcaaggagtgctttcaaaaaggattaactacatagaattatatcgtgtatatgattatgaagaaaagcaaagttttatccagtctttaataaacaacaccaatatctacatttattctggcgataaatcaacaccagaactactgatgaatggtcttaaagctaatagtgatataattcaaaccatcagaaatagagtagaagaacaaaaaaagaaaaaaggaatatatgaatttacaaacagataatgatatgaaaagagtgcttttatttttttccctaatgttactgttaggcaacataaaaggactagcacaatctattgtcattgacccggtaatgattggaacattggtttattcccatcaggagcaacaaggtgtattgaaagacatacaaagtgaggaaacaaaaatccgcaactttcaaattttaatccaacaaaaaatgaatcaaattcaatccttacaggagaagacatacaactatctttctacagttaatgcagttgtgaaaaatggaaaagatattatttatgcttcaaccttagctagagacatagctaaataccaatccgaagcagctaaatatgcagttggagaccctaaattattaaccataattgcaaaaacagagtatgagcttatcagtcgaagtgtagatttaatgatatacataaacaatatagcattgcaaggcggtgaaaaaaatcttatggataataagcaaaggatagatttatgtattcatgtggtcaatgaacttagacgaatgcgaggacttgcatacgctgtatgccgacaaatgaaatccgctaaaagggctggagtactaaaaacacttgtacccggacaatttaaatatgtaaatagtgggaaacaaaaagtagataatattttaaacggtattaaatggattagtaaaggaggatattaaatggataatgatacaatcaaagatttaggcttatgccctatttgccagaaaggacacataatgaaaggcagtttaggatattcctgtaattacttcaaaaacatgaatgacaaatgtacatttaatatttatcattcatattggggaaaagagattacagaagaaatagccaggcaattaataacaacagggaaaacagatatatttcatgacttccataataaaaaaggagttcctttttctgcatatctgactatcgaaaatggaatcgttattccttctttcgtaaatgaagtattagaaactccgtgtcctgtgtgtggtagagaaattgaaattttactaaatggatatgcttgtaaagggtattcacaaaaggacaaggacaacaacagagtttgtaacctctatatacccaaaactattgcacaaagagaaataccattggaagcagcagaaatacttgccagaggaaaaaaaacaccgtttatgactggatttaaatcaagagaaggaaatgatttttcttcacggctggttctaacagagaacttagatatttcttttgacaatacattgtgtaagtgtcctaagtgtggaggaaacttatatataaacaaaaaagcctataattgttccaactatagaaatgaagccataaaatgtgattttgtcatttggcgtgaaatgtcaggacgttctataactcccgaagaagcaatagaactttgcgagaaaaaagaaacacctgtgttaactggatttcatgataaaaacgggcaaccgatggaaagaaagcttgtactgaacgatgattttaaaataaaactaatatgaaaatagaatttataatttatagccatttttttaaagagagaggaatgaaggtaaagggtgattggaattttccgcatcttccaaggataggcgaagaaatttcacctcacattataatgtttcagaatgaatttacctatcaaaatttattagaatatctaacagatgaagctaaaagtgattttaataaattcaatgatggtgaagatgatttagaagggaattttaaagcatgggtatatgatgttatctgtgaggtcaatatagttgaatcaatacattatagaccagatacagaagactatacccaaattattcctgaaatttgtttaagtgatttaagtaattaaatattattgatatgcaaatgaataagactgatttaatcaaaatggttgctgaaaaggcaaataaaccaacaaaagaagtagcagaaataattgatagttttttcaaagaattatctcaaaatctaagagaaaaagatgtttctataaaagattttggtactttcaaaaagattattcagccagctcggatagctagaaatccggcaactggagaacctgtagaagttccagaaaaggaagttgttaaatttaagccgtccaaaaatatactaaacatgaaatggctatgatagaaataaacatccatattcctatagatggtgtgaacaatatttctataccaatccaattacctgtagttccaagggttggagaaaagatttatctatctgacaaacaaataaataatttgataagtctattagaagaagaatattaccacaatccacaaacagaagaatggaaagaatcaataagacggttcaccaatattgaggaagtagcatataatgctgcaaatggaacgatacacattgaattatcaactatttaaaagaaacaatatgaaaaagtatttatcattagtaatgattggtttaagccttatgttgtctggatgcaataaagacgataacaacgaccctgatactccacctacaggagatacaggaaaagtacgttatgaagctaccgtaagcgacccagaaaatttcaaacttctaatacattatacagtaggagtagatatttcttccgaagctcccgaagaagctgccaaagaaactattgtagaaagtccattcacatttgagcaagaagccaaacaaggaacatatttatggctatctgcctaccctatacctaaagatgaagaaaaccttgaaaatttacagctacctaagacagtcgaagtaaaaatttttattgatgataagctgcataagtctaacagtggtgaaaattatgcaatggttcaacatatattcggacaggaaaattaccagtagaattgataccttttctgcctgcactggagagaaaccgggaaggtatttgataccgtacttttccgggttctgcccggcatggacgataagagaacattattatgataccaaaaaataaaaaccaataccactctcactgcataaaagagtggtattttcatttgaattaataaaatgaaagaccaaaaaagattattacacaagtgcctattagaagacattccagcttttgtaatatgcggaacagatatttgttccgtccaagcaatggaagcatattaccagatagcagtagaaaaaggttgcaatagcaattttttagaagacttgaaattagctatagaagatttcaaggcttttcaatgtgaggaacctgaaaaagttaaaatacccgattaaatcatggaagaaagcaaagaattacaaaaactatatggattcatgcaagcattcatttatataactgtttgcatagagattctactatttgttcattttccctttagtgaacaaattatgcccttattatcaaaaatggcaaaaattcctatctattctaatattctttatagtaaactatttacattctttattataatggttacttgcattggaacacgttcaaaaaaggatttagaattagacccgactaaacaaatcatttttcctttaatctttggattcataatgttctttggaagtatatgctttcttttctttaaagaaaaaggagaaactagtttagaatggtataatatagcttacattatactatcaataattggagcgacattaataaattcagctctagataacatttccaaacgtattaaatcaaactttatgaaagatagatttaatatagagaatgaaagctttgaacaatctaaagacaaggtagaaacagaattctctgtcaatattccgatgaagtttttctacaatagaaagtggcataatgggtggctgaatatatgtaactgttttcgtggaactttcgtaataggaacgcctggaagtggtaaatctttttctgttataaattcttttataagacaacattcagctaaaggatttgcagaagttgtttacgacttcaaatttcctgaacttgccaaaattgcatattataattatcaaaagaacaagcaattaggaaaaataccaagtaatttcaagttcaatgtcattaatttttctgatattgaatatagtagaagaataaacccattgaaacgagaatatatagaaatcctagcagatgcaacagaaacggcagaagcattatatgagagtttacaaaaaggcgacaaaggaagtggaggtaatagcgatttttttaaaacatcagcagtaaacttgttagcagcttctatttatttttggtctagatacgagaatggcaaatattcagatttaccgcatgtactggctttccttaatcaagaatatgacgtactttttaaagtcctcttttccgaacctgaattaaaatcactagtttccccatttgaagctgcatataaatcaggagcagtggaccaattagaaggacagatggcaagtctaaaagtacagttatcaagactggctactaaagaatctttttgggtatttagtggcaatgatttcaatttaaaagtatcagataaaaaagaccctagttatcttatcattgcaaataaccctaaaacacaaagcatgaatagtgctttaaatgcacttatcattaaccgattaactagacttgtcaatacaaaaggtaactaccctacttcaatcatagtagatgaatgtcccacattatatttttatcaacttgcaacactactttctactgcacgtagcaataaggtttcaatttgtttgggattacaggaactaccgcaattagaagaacaatacggcaaagctaccgcaaaaactataacttctattataggtaacactttatccgggcaagctaaagctcctgaaactttagattggctacaaaaactatttggaaaagttaagcaagtaaaagaaggtgttactatcagaagaaacgaaacaacaattaatatgaatgaacaaatggattttgttatcccggcatccaaaatatcttcattacaagctggtacattagtagggcaagttgcattagattttggacaagaagataattttccaacagcgatgtaccattgcaaaaccaatttagatttaaaaaaaattaagaaagaagaagaagcctacaaagaactgccaaaagtatataactttgggacagcagataatagagagaaattactgcaaaaaaactttaagagaatatacgacgaagtagaaacagtaatagaacaatatgtataacattacattaccaattttaggcacaaggttaaagcaaatccgagagcatataggatattcccaagctcaattagcagaacagctgaactgtaaacaaaatgcgatttcaaatcttgaactaggaaaagggggcagcctaaaacttttatttcaagtgctgaatttttattctaactatgtttttatagatttaatatttagtgaaaagttttatctgatttctaatacagaagaagatgaagcgcaaaaagccaattataattctgttataatagaaattataagacaatcagaaaaaaactatgaggatgctatgtcaaacgctaaaaaagagctagaagctaatcttcaaaaagccatcaatttattacagccctaataaaataaaagagagtacaaaatactctcttttattttccaatattactttaaagaatttgtgatacctattcttttggagttctggcactgatgggcgtatatagcatgatgaaatgataccgaattatcgtccctggtacaccctgaagaactcctttttgataccaaatacaaaaagctgctggaagccggacacaaagaattgataccataaaactatagggaaaaagaagaaggacaaaatgccatattatatataaataatatgaatatgtgattaatatccttcactccccgaaacccagaaagagcaacacgagaatcttcttttccctatgtccatttcataaaaatgataccagtataataacaaatacttataatatgaaaagagagcatccaaatacataccttttaacaatacaatcgaaatcaatctatcctatctaattctattatagctactttctctttatctggacttgcttcattttgtataagagttatatgtttttgggtatagcttttaataacccaaggagcaccacctaaatataaagcattgctattaaatatgatatattttccttctattttgtaagtaatatcaatttcatcgtaactttcccaatttactttccccgattgagtatctataaattgcatacctactcccatattgggaactacccaagcatcacaacgacctgtaccacgccatgaggtttgatatagtttttggggagtaagttctcctatttgtacctctggatttttatcatcacaacttgtaaaacttatgtttactaaaaataatgcccaaagcattaataagcaagattgtttaaaataatgtaccatgtattaaaatagattatattaatataaataccagacttcaaaattacaatcctataattgtgtatagatttgctaatgttgctattgaaatctgtttttctactaaattagaagcccatgaactaagaccatatacttccagcaaactctcatctctttcatctgcaaaaaatgaaaaacagagtttggtagttgggtcgtataaatattccatattagttgcctcatgatagtacttacagaaacctttttcattgaagttctccaaaaccatacatagcggagaacgcatttgaggattaatacgctttctagtattataacttatctgaatatcagagctgaaataccttgatatttctgccgatataatttgggcttttttgataaaaacattatcatcttcattttgccttaattccgcatccgtagcattacttttactcaatactatttggtcaccctgtcttgttgttaacacagcagctacatcatataaactttctcccgaagcagatgtctttgtcaatactcttgcaatcgtaatagacggagtataaagtcttgtaacaggaagaagaatttccttagaagtatcatcaaaacgtctttgaaagtttctttccagtacaaaatccgacattggatataatccttcttctattaaatcaatcactgtatgattttttgaatcatttaatgattttctccaagattgcaagtttatatttatgtctttaagtgccattgtagtattcactacacctgtttcatcttgaataccacccaatgtttttacacgtataaatatatcttgtcttttgtaaactgtagaatcaaaagtaccatcctttccattaaatccgaacgacccattaagtgaatcacctttatatacaagtgaagcattaatatttttctctaaggatttagttttctgttcaacattcgtatttgaatccgcattacccatatattgcgcaaaagctcttccacctgtataataaccaacaacaacaaaatctccatatgaatcaatgatagatgatataggagaggtatataaattattaataaaagaccttcttaaaaactgccttgcaaacactttattagaaccattggaacttaacaaggtaaatttgccatgagcaaacaatatattcatttccccataagcttgttcttttgattcattaataaaagttctaaatgtttcggttgtcgttttctttttccctatagaaaaaaatcctagatttaaagaaaatccacttttcacagttttacttattgatgaaaaatgcgtataattattaaaatcataataagcaaacgatgactggtcgttccagttaggataattttcatcaatatatgattcatcatattcttttagagattcaatatcaagtatggaatgcgtaaagttatcaaaatcacttggtatataattccccttaagcaatttataaccataacctagatatttatcagttcccccaatcatctcaccacttcttgtcaactcttcatcaaaagaaggttgtcctgtaataacatctggaagagatggattacgttcttgaagaatcacatcatcacatgaataatcagtttcaaccactgtattttgctgtgcgcataagttcaaatcctctgaacaagctataaacaatggagctataacagataaaattattatatataatattgatttcataatcttttcttattgcagattattattagataaacttttcatatattcttctaaaggaattgttactatttcgtctggttttgcctttgatgtagtatttattattccataccaagaacctttaaatttaacttctctatcattagcctcatttccattacgataagtcatagtaatagtatagtcagcctttacactatatttctttaaataagtcgttactttaattaaagatggctcatcaacttctaccggaatagtcaccgataatgttttaggtatctcatacgttgtggaagtataaggagctctaggcaaaaatattgttgaatcaggcatttccccactactaaaattgccaggggcaataaattgcccggctattattgcaggacgtaaaaacatttgttcttcatttgccattggaattttcaaagctcctttttctgtataacaagaagtatcttttacatctttttttgcataaattgtaatatttgatggtccagcaactgctcctgtctgaccatttgaatacacaacaacagggtctaattccgtcactacagctttaggttcaaatgctatttcttttactttaaatttatcctgaaactctaatagaaactcttgctgtggttgcttattatattttgcataccctacctgcccattactctttacttctatagaataattaaacacactccaaggattattggggtctgccgttcctaaatatgtctgattttcaatattaaaatatcctttatatgttgatggtataaggtcccaacttccagaacttatatcttccgagtcccaaacaaaaacaagtttattgtttgggtcattgttatattgaccacaaaccaatggcttattataagactttgaataaatcaaatatggtattccactactaggtggcaaaatctttaaatagaattttgaagaactataagctgaaagtatcaattcttttctcattccttgagtagaaagataaggctgtccaaccactccacctcctctgactttcaacgcaaaaggaagctctctaacagcatacatatttgatgaataaaattcatctgtctcaggataataagaataagatttcgtttctggcttttttttaaactcatctatattagaaaacagactcacagagtcagcaacagagatagctcttgactggattgaactttctgatgtttccgaaaaatcatataaaagttcagaacttttttcacaagagacaagaccaatagtcattgctcctaccaataattgacttacgccccaaaaagaatagaatttttttttcataaatatagttttaaaattatgtccttagaaacaaatacacaatagagttcacgtagatttactttctgacgcacgcgaatacgccacatatacaaaaggacgaagagaaaacaaatccatgatgccaaaaacttttaggtaaatatataaatagctcttacagcatattacgttaagagctatttatcccaaaaagtcagttatattttacttaatttcccgaaagacttagccaaagacgaactgttcttttagccttattctgttctccttctagaatctttgcatcacctttcttatagcttatttttaattgagaatcagtctgtatagcatcatatagaggaagcaaaaagaaattatcttcatctaaaagtttttccattattaacggaataatatttttacccatcgcttgcatttctttaaactgtggtaatgttgtataagcgagagtacttgaactatatttagtttgtggatttattgaaatttcttcgttccatgaattaaacaaatcgttaaacttagtctttacctcacaattaatatttgcagctttatcaatgacagcttgtttttctgcatcagaaagttcaatatcttcttgtgctatctgttttgcaagttcctttatctccgacatatcagtctttgttctactctcgataaaagaaaccaaaattctaccatacaaagtgccagatagctcactccttttatgggtaatacgcaaataacgcccaagttttgactcccaagtaccgctactatatacaacacttccatgagtcatatctatactacttgttccccaaccatcaacagtagcattgctaccttctgtactagtctgttcataattacaagacgaaccatataaagttttagcatttttatactgttctataaaatcattgtaaaaagattctgggtcaatccatttgttagttatccccatagaataagcaatacaattatatgtacctgttgcttctcctgttacagaaatattatttacatctaaatttgggaaatcctttttaagattatccttttccgcttgtgtaggaacccttctcatagaagcagctctagtagtaagttcgtttggattggcattatcctccacagaaccaatctcttcgttttgctgacaagcaataagactaaaagagaaacctaataaaattaaaatttgttttctcataaaacgatatttttaagttagtaattattcagcaaatgcatttgcatatcgcaaatatacaatacaaattatatataatataagaattatattgttttttccactgttaatgcttaaaaacataatatatttgctatttttgcaatatacaatctaaattatactaatatggaaaaaacttatcattcattaaaagactttgaactatcctatgggaaaaatgctattgagagagcaaatgatttccagcagtacattgagcaactaaatgatttcggatgtaaaagctattggataacttcacatacaggtatcggttcaacaatggcaattgaaggcttcaacgaacctgttattgcatttatttctaatgattatttaggtatgtcacaaagagaagaaactaaacaagcaggtatagatgctataaaaaaatatggaacaggtgcttgcgctgcacaagtaataggtggttatctcgacatacaccaacagctagagaaagaaatagcttcttttgtaggacaagaagaagctattttattttcttccggatttggagcaaatgccggaatactaagagccttattgggtcaaaatgatattgcattgatagacccttatatccacacaagcgcaatggctggactaaaaggaacaaatataaaacgaattgggcataacgacctagaatatttggagaaggtactaaaagaagtcaaagggcaatatcaaactaaacttgtaataatagatggtgtatattcccaggatggggatttgtctttacttccggaaattattactctttgcaagacttatgaaaccatgctgatgttagatgatgcacatggaataggagtaatgggagccaatggcagaggaacagctgaatactataactgtttaggtcaaattgatattattactggcacattcagcaagtcatttggttgcgtagggggatttgcagcagcttcgaagaagataatacaatacttgaaattttatgcggacagcaatgtgttttcagcagcccctaccccacaagtcacagcatccatactaaaagctttagagattataaaaaaagaaccacaaataagaaccaaactttgggaaaatacgaactatcttagaaaacggttgaaagaagaagggttcgacataggaaaatctgtttcccctatttttcctattatgataagagataataaaaaggtttacgaaattgctaaaatgttgcaagaaaaaggtatctttacaattggaattgtatatccggctgtaagaaccaaagaagcaagattaagggtcagcgttcttgccacgcataaacttgaacaattagaatctttagtcaatactcttaatgatataaataagaacataaaaataaaataataatgaaagaaaggagaaagcgaagaagtgccaaagacataaaggaaagcattattaatgcggcaacccatttaattgaaactgaaggattttctaatctaacagttacaggtattatgcgacaagctgaaattgagcctgtacaattctataacagatatgatgatttgaataagttcattgacgagtatgtaaaaaaatacgactattggtttagcgatattgtaaaatcacaaaaacaatctagtaacgataaagcactatatatgaacattcttgtaggtttatttcaatctttatcagaaaataaaatcatgcaagaacttctaaaatgggaactagctaataacaatgaaactagtcaacgtaccgctcaactacgggaattgcacacgttacctttatgccaaaaattctcaaacatattctccaatacagatattgacattgtaactatatctgcactaataataggaggaatatattatcttattttgcatgataaactttcaactttcagtggaatagacttaaaaaaagaatctgacaaacaaaaagttattaaggctataagcaaattgtcagacattttatttacgtttataccttcttctattactaaagaaaatattgatattataataaaaatgagagaagataatattcctgtagaaaaaatagcatattatacaggaatccctaaagaaattattgtttctatctaaaatatccgtccaatgaggaaaaacccattggacgggtctatagcctaaccggcactataaaatattttgtgtaaatggaaatacgggattcagaaatgagtctcgtattttttattttatacatttgcaaaatgaagaagcttatgaaagaaaagaatcaagtagtgcctgatgaggttttaagcaagtttatcagtcagttcaagacagaagccgatgtgagcaagtttctgaagcagttgcatgcccaagtattggaaaagatgcttgaaggtgaaatggatgcccatttgggatatgaaaagaattctgtgataggaaataacactggcaactcccgaaatggcagttatccgaagaaaatccaaaccgaacatggagagtctgtcatttctattccacgtgaccgtaacggccagtttgagccgatagcagtgcctaaacatgaaagccgtggactttctatagaaaagctcgttatctccctatatgccaaaggaatgagcgtttctgacatagaggaagagatgcgtgagatttatgaaatagagctctctacatctgccatttccatcattaccaacaaggtcaatcaggctgcccaggagtggcagaaccgtccccttgatcctgtttacctgatagtctggatggatggtattgtcttcaaggtacgggataacggtaagatcataaacaagaccgtttacctttgcgtcggactgaaacagaacggtctgaaggaagtccttggcatgtgggttggcaaatcggaaagctcttctttctggatgggtgtcctgactgatttaaaagcccgtggggtgcaggatatcctgattacctgtactgacaatctgaatggatttacggatactatccgcagtatattccctcagtcatccactcaaatctgtgtggtacatcagatcagaaactcctgtaaatatgtggtttataaagataagaaagagtttacggcagatatgaagaatatctataatgcacccaacaaagaggttgcagccacagaacttgacaatctggaaaagaaatggggaggaaagtatccttatgctatactttcatggagaaacaactgggatgatttgactgttttcttccagttcccgctggaaatcagaaaaataatctacacaaccaatctcattgaaaacctgaacggaaaaatcagaaagtacacgaaatcaaagctttcattcccttcggatgatgcagtcaaaaagaccgtttatctttcacttatggagattgagaagaaatggacacagccgattcataactggggcttgattatgaatcaatttatgcttatttttgaaaacagaatccagatataagaacaaacttacagctgaatcctgtttccatttacacaaaattttggacagtgtcgcctaaccaaaaatcttttgtttcacaaaacgaccctttttctgtactaaagaaaacggttctttttttgcttaatcaaagaacttatgtcgctacggtgtttagttaaccaatcttccaaaataaacgaaactaaagatgaaataggtattttggctttagctttgagcaacccaaacacctcttttacatctgtatcaacatatagaacttccttgcaattataattttttcctttaatgtactctaataagtccgtcaaatccatttcactagagccattaaaattaaaaacttccgaagaagttgtttccatttctacatgaagtggttctttctcctcttcaacttcatatttagcttcttgaataggagcttcatttatactactcccatgcaattcttcacctcttatcattttagctatttccagaacactagaaataccttcattttgctttttccttaatttatcagccatgtgcaaatatatacaataaatgaataactttataacaaatatctattaaaagaatattttattttattgctccttcttgaatgatataatcataagcattcttcaccttatcaatacactcattactaattgctaatgtatttatacgttccatagcaacagaagctggtatttcatctgtaacaaaaccaacttgcttaagaatatcaactacctgttcttttgtttcatatcttaccgcagttctcatattgttaggtaaaaagaatattttagcttttacatttaaatactgtaacacttggataaaaaaacctgtactatccattgtaaatttatcgtatttaaatgggcatattattatatccgcagctttaagaatagttcccagagcatcatcatcaatcttaccaggcaaatctattaatagatttccttgctcaaccttagtaaaatcactaataattttagcaacattagatatatcggtttgtataacctcatatttaggttcattatcataggtcgcaatatcttcttttcttctatccgataatgaacgctgaaaatctaaatccaatactagaacttcttttcctttttctactagatagttggcaaattgtatgcaattagtcgttttaccacaaccgcctttctgattcccaaataatattatcatatcttacttatatttattaattttgttgctgtcctcttttctttttcctattaggagatttatcttgctgtacatttatatgctggctaagaatatcacaaatagcatcaatcagattaaatccccttgccagttctgaatcttgttcaacatttattctttccatcttatcaagagtaactagagtaatcctatctttactatagccatcttttataatattgattcctaaatcatcagtacttacgattactttattctttttatctattagataaactaaattatcatcttcaacaaaaagaattcctttttctcttaatgtagaatgtaaatctgaactatgagccaaataactatttatcatatcagtatagacagtattttttttatccatatgctcttgaatcaaaatatcatcttttttcacatgataaattctacttaacaactcggcttctttaagtgtagcaacattaaatttatttgcttcatacactctgctattatatctaagttctttcaacagttttttatcaagaaccaataaagccttatcatcaccatttataaatattgtgccattcattgaaaacctataaccgtaatctaacattaatttcttgaaactatccattgtatattttgttccatctttcaaaagaagattaattatactattacagtgttcaacttttgcttgtttattaggctctactaaaagttccttcaaatccataacttccccacctttcaaaactctcttatttctataatcaattaatgtatatccataaggtttagtatgtccttttcctgtatgaaagactaaatttataccaaacttatctttcatcaaagtttgaagttctgtataggaaagtccttgcttatatttaaataaaagagctgttatctgttttcttctttcttcatcaggtgtatattgtttagctttatcttttatctgctctaattgaattgaagcgtgcttttcaccacccttatacaaaattaataatccatccttttctcttaatttccatcctgattgttcaagtaacaacttatattgctgcactgtagaaaaagaaaactccatgtattttgaaatatcatctttagccttcaaagctaaatcaacattcattatttgatttatgactttctgtgagcgcacagcttccatattatcttttaccttctgtccgttcttctgtactcgtgtagaaacaatatgtacatgattattttctgtatcagaatgaaaatatatcatataaggattatttccataacccattttatttatatattgcaaagctacatttttcaaatcctctgccgaatattcacgccccttacatgaaatcactgcatgaaattgttttgccttgaccgctggattagtcctacagacagattccatataagctatataatccgacttcttcaaattatctggattcatagcaaaattttctgcaacaagaagttcactcttgccttcctcattctttcgctcattataatcaataccagcgaaagaagttgccgcttttaaaactactactaccatatttataacttcacaccgcaaatatacaaacaaatattcaataaaagaatatttcaatataatttattcatacaataaatatacaaatattatatattcatatattatttatatatataatattttcccctaaagtttttggtatcataataatgttttctcttcgtccatgccgggcagaacccggaaaagtacggtatcaaataccttcccggtttctctccagtgcaggcagaaaaggtatcaattagatgcaatccttttgccgatgggcggtagttcctgaatggtgtcggtgtcttttcttttatgatgcagccgttttcctgtattcaggtatagagagaaacgacacaaggaactttagggaaaagaaatagtaacgctgtctttatcactaaaattatatatataaatattatatatacatatattatttgattgacatcaacttacgccaagtaacattcaatttatcttgcataattacatagtctgccattttcttttctacctcattaagaacctcttgattaacttcttccttatgaatatttacatacctagccaactgatttatattatttcctatacgtttcatttccaaacaaatttcatccatcgaacgaataaattctttagggtcaataagaccaactcctttcctaaagactctctgtctaaaataatctgacatacatttgctagatttagaagctttagttagttcttcatattctaaattcgttaagcgaactttcactattctatctcttttatttgctttcatactatgatactaaataatatatgcccccaagttgcgagggggctaaactcctgatttatcaggcaagatttggtttttgtgtccacaaaaacacatcttgctattaatttctacaaacgcaaatatataaattactaaacaccctcccaaacaaaagggaaaaaaatacaattagataagtttttttggtatcataataatgttctcttatcgtccatgccgggcagaacccggaaaagtacggtatcaaataccttcccggtttctctccagtgcaggcagaaaaggtatcaattagatgcaatccttttaccgatgggcggtagttcctgaatggtgtcggtgtcttttcttttatgatgcagccgttttcctgtattcaagtatagagagaaacgacacaaggaactttagggaaaagaagatttttcgtgtggctctttctggaactctggaagtgaagcgtgttaatcacatattatatattatttgtttatatattatatattcacatattatttatatatataatattgtattttgttcctgttctttttccctaatgttttatggtatcaattttttgcgtccggcttccggctgctttttgtatttggtatcaaaaggtcgttctacagggtgtgccaggaatgataattcggtatcaatttctttccctacagtatatcaaaaaagcatagggacaaaaacccaactttttaaaatatgttttttttagatagggacaaaaacccaacttttgattgattatttgtatcatatagtgtctttttttgttaatagatgttcttttccctaaagtttgtgttaagattatgagaaaagttccttttttatgggtttatgtaataagaaaagttccttttttgtgtgttggtatgattatcaggtttttttttatcagctagtgatggtagtacccttaaaaatgaaagggtaactatctgaaaaacaacagataatggtaaaaaatcagggacaaaaacccaacttcttagggacaaaaacccaacttcttagggacaaaaacccaacttcttagggacaaaaacccaacttttagacccctcctagggacaaaaacccaacttttattcatcttctttttcttctccaatcattccggggagtatttctacttcttttaataatacggataaacaatattctgctttatttgaaattttattccagttatctctaacatattcgcctagataaagcatcttagttactactgctttatagttgcttaatgtaatctgtggaataaactgctgcaaatgctcgtccttcattgcaaagtgcaaagaacaaaaattcgttatcatcttcttttgtccttttaatagttcttcttccttctttgataatgcagacttaataactttgaaattaagtttataaggctgtgtatcgcctgaattacgataaacttctgccatttcaaaccagcaatcagcctgttcaaacaaatcatcgtaaacagggcgtattacacgtttatacaaatctttaaattcggggtatttatcttctaattttaagaatttccgaaatctatccacatagatagaaaaaccacctttttctttccatgagctaatcagcatatacattcttattgtatatctactttgcgctcttaaagctatctcttttatatagcgtgtaaaacctctatcaacattaatgaaaactttagcaacctctctatccatttctaaagaaaaacctcttgaataaggagttttgggtatatttgccttagtgaataaaccagtaatagaccaactatcctcacctgttattgggtctttaacatcaagctctacaggaatactgattaatttacgaaccatgctttttacttccttgtattggtctggattaacgcccaaatcccgatatgcgatatctactcttatacggtctgaatattcttgaaataaagataattgctcgcatggaatagatgtaccatatttatctagatgctgaatacttaattctatgacatcctgtaatttctctataacagcaattaagattctaatctgtactgtcttaaaatcaccagccattaatgtaactacattaggttgtttcagccatgtgggattttctgggagtttcacaggaagatttgtacgaggatgccctttcctaattctaacaatctcaccgtctatttcttctttttcttctttcaccgcacgttttcgggcttttatttctctatttaccatcgcttattattttgactgattaatactccaaaaaaaagtagaataaagaacacaaacataaacttggctatataaaatagccctatgaaaatcattctaaaaatagcaatgataatttctaatagatttcttattatgttcctccagtccattttctttgttttataattcctgtcgccaaagctccggctgcactattgtataaccagcactttgcaaatatactcttttaaattcatcgggcaacgttccttcaaggaattgctttttatgccttgatgcagttcggcggtcatatggactatttttagaccaacctcttttaagaattagttccttaaagcattcatctaatgtttttgctttatctatcataatcttttcgtaaagaaattatagggtttttcatccctttatacgtttcacaaggatttcctaacagttcgcacataacaaaatgtacaatttttccttcatccaatgataaattcgatttatttgctaattctacaactaatgtatattgataactatagttctcaacaacaatttctttttcattggaaacttcattgtaaatctttctatacttatgccataaagacgtattaaaaagctctaccgtaagaaaattgtttacctgctctgttgtatagtcttctggcaaacgtttccctgtaagtctataaacagcctccatttttgctttttttcctacaaacttttttttcccaatcatctgacaagaaggaagttcatccctagatataaaaggcttcaaatctgacaccctacgatataccttatattcaataaacattctatctatattttgattatatgacatctattccctttcacactattcgaaaaattatggtcatttatcccaatcataattatcgtaatctatttcctttcctgtagcatggcattcagccacataatcagcccatttttttcgcttcgtcacatcaaaaggcatacgtagaaactcatccttccaaggctgtataaagtaaccaaaatcgtgtttgttcgttacatactgaacagcatctctaatggcgttatactcatatccttctttcaacaatggttcgtcacccagtttagagtatatgtttgccacttcccgaagcatctttgcaaattctttgtatgtggcaaaattcttttcttttttatccataatcattcttttttgttttgagtattaatttttttcgatgaaagtattggttgtattcaacaccccggctgaatctcgacttttgccatctcttatgaagattccttcttctttcaaccgttcataatcaaattcattcatcatgataatgacaatattttcatttgtatatagcttacacttcataaattgagtaccttctatttttccaattacgtctatttggattgttctttcattcataattcgtttatttatatatcgatttgaggattattcttgtttttttacttcatatcccttttctctgagatacgctgctatatactcatcatctccgacatcattaaggacatcgaaaagataaccttttacataactggctactgcaaccgcatttgcatactcgatgttctgcgaaatgaatctcactttctctgttcttcctaagcctctgaaggcttcttcaattttgctcatatttatactgttttacgctaattctgtttcaataaacttcatcatctgattgtgaaaagaaccactccttttttgcgcagccttacaatcatcaatggaaagattcgattccttaattatccctattgcgattgctggcatatctctgactactacaatatgctgaacagcaaaccaaataccatcaataaattcattattcatatcttcattttattggttaaaactcatattcactttcattgaaattttcgattgaataaattaaaccaccgaagtcacctgctgagaagcctccagtaatattacttcgatgtgttcccttatacttaccaaaggttaatgttctttcttgattcattactattctgttatgcgttatttggtatgataatcccattttatcttgacttatatatctggaaaagagacctgtgaactaaagactactctttcttttccttacgcctcgatttgagaaattctttagccgcttctttgtcctcatgtacttcatctgatacataatatattatagcctttgaattgtgaggattgtttttccactttcttcctattgcatccggatttacaacatatccttcttttgcccattgcagggctgttaggctcttttggttcattctcttataccaaagaaccttacgatgcatttttgtccggggagtaattactccgtctgcacataccagtccttcacagttgtaaccggggctttccagaaattcaatttctttttgaatttcttttatgctcattttctcgatgcgttccatgtattgtgcaatcgtttcatctgtcatatccgctgccatatttcatgaatttatgtattaaaataaggctattaactagtttaatagcccatttttgatttcaaatactatcaaacgtatttatccaattctttttctagcttttccctatcaatctctggaaatagttcaagaacaagacttagcgaatcgcaataattgtttgcatagttttctgtatccatcaatcgtaacaccattgaacaaaaaatactcttttcctgcttaaaagtacgatttaacacagaactagataatctgaaaattttcttctctactccaatcataaattaatcctttcacatttctaataattgactatcaatctgtagttttcttcaatgcttcaaaagaagacaagtaatcatcaacagctttatttaacgctgcatatttatctttccacgtccttatttgccgttgtgtttcaatatacctatcattcaaagttgcataattctgaatagcaaatctaatagctttagcatctgttttttcaccagataatttttttagattttctaactctgcgcaggctgcatcgtctaagcgtaatgtaaactcttttttcataaaaaaatgattaatgaattaatactgaaaaatagcactaacagttggctacgaaatggatttaagaagcaatgtttcatgattttgtttgctgttctttatactggcagccaaaccagctttaaaggtttgtttatctctttattttcaatactcaaagatagtaattttctataaatgtcgcaaataataggacaattatttttgttaaaaatggttttaggtttatagactgccgaggttttatttttccctaaagtttttggtatcataataatgttctcttatcgtccatgccgggcagaacccggaaaagtacggtatcaaataccttcccggtttctctccagtgcaggcagaaaaggtatcaattagatgcaatccttttaccgatgggcggtagttcctgaatggtgtcggtgtcttttcttttatgatgcagccgttttcctgtattcaagtatagagagaaacgacacaaggaactttagggaaaagaagatttttcgtgtggctctttctggaactctggaagtgaagcgtgttaatcacatattatatattatttgtttatatattatatattcacatattatttatatatataatattgtattttgttcctgttctttttccctaatgttttatggtatcaattttttgcgtccggcttccggctgctttttgtatttggtatcaaaaggtcgttctgcagggtgtgccaggaatgataattcggtatcatttcatcatgccatgtttacccatcagtgccggaactccgaaaagtacggtatcaatttctttccctatagttcttattgggttagacaacaagacgcattaaaatgtattctcaaagtgagaatgtattttaatttgcgtcatgtttccgcttctgcaatgcttactaaagtggagttacctaaaaggtagtggaactttactaaggattgcagaagggataaagaaacataccttagaagggtgggtgggtttaccgatagcaaaactattggagcgtaacaaagtgaagcgattaagcctttttggttcttttttggcgtttgaaaaaagaactccccccaatgaggggggaaggaacctttaagcaacctttgtatttttctcttcttcaacttcttccacatctagccttatatttagatgctgggctatgaatttactacctttaatagcatctgccaatacagtaaataaaaatttaggttcttcttttattgctttgcaccatgattttaaataagccgcattttcttctctgacggttacagaaatacccaaatatacaccagacaaagccgatattaattctgctacaagttcttcacgcccataattgaatttatcattttcataaaatccttttcgatttagtctatttttaacacctgtactatgtcccatttcatgtaattctgtaccataaaaactttctccgtccttaaattggctctttaaaggtaaagtaatgctatcatttgatattgaataaaacgcactatcactagaaaccgtttgaataggacatacccaattttgattcttattcatttcatcaagtattggatttacatacatttctttctcttcttgtggctgttcctctcctgaaaatttagcctttaatatatcccatctattgggatatttttccgcaaagtttgtttggtctaaattaaaaacttggaaatattttgtataagctgctaaacggtattctttttgttcttcttctgataatttgttatattcatcatatgaaattttttcatttgtctgacgatgataagcacaaaataatgtataataaacaggaaaagcaacagcaccttttagaacattaataccttcgtttcgtgcttgattgaatgtcaaaaaaacaggagtttgataattatatttttcacacaaaaaataaagtaaaaaagcgtttccaccactataagtacgacctgttaaattttgtggtaaaaagttctgtttagagttgactttagagaaccaaggtttttgccaattcatagacaagctttcaattttttcaaccataaggtttacaaacttctctgcatttttatcaaaagtagatttcataattttgtttgctgttctttatactggcagccaaaccagctttaaaagtttatttatctctttattttcaatactcaaagatagtaattttctataaatgtcgcaaataataagacaattatttttgttaaaaatagtttataatcggctgatttttaacgtattatcttttccctaaagttttatatattttgggtgagagataaggttttataaacggaatattccctttagggaacatgaagtctataaaaccgaatatccaatgccttgcttttgtaggtgcttcatagaagcggtgaaaaaagcaaagcattggatataccttagaagggtgggtgggaaaatgcgttagggattgcagcggaaagcccacagcgtagcgaggacttgcagcgaaaagcccgacctgaaaggtaacgccctatttatttcttctattcatcaatcttactttttcataacgtaaatacctatacaaagtagccttacttccaatgtgtaaaattctacatatttcatctatagaataatcccgattttcatataaacgctttgctgctatagcttttctctttgcatcttccgataaccctataggtcgtcccgtaagtttccctcgttcttttgcagcttgtaatccagccctagttcgttctactattatttcacgttcatattcagccaatgaagcaaaaattccaaattgacatcttcctaaagcactattagtatcaataccatcaactatgcttttgaatgcaatttttcttttctgcaaacaatcaactatataaactaaatctttcaaagaacgtcctaatctatctagcttccagataacaaaagtatcaccttctcgcaaatatgcaagggctttatctaattcgggtctatcctttactcctgatactttttcctcaaatataagtttgcatccggcttcttttaaagcatctagctgcaaatctaaattctgttccctcgttgaaacacgagcgtagcctattatctccattttatttaaatccaagtttcataaattcaactattcgcgaaactattttaaactagggctttcccccctgttattacctctagtactattataaatcaaaagtacagaaaaagggtcgattaatgaaacttttaaatttaagaatatgagttattcacaatttatcatggctgtatttgccatttatgtagtttactacgctgcaaacatcctgtatgatgctttcctaaagcaaagcaaaaccaatacaggtgaagaagaagaaattatttcaataggagaggaagaagaaatacctcacaaagttgtagatgaagattttgaaacaggctcatacgaaaaagaagatgaaaaaaaagaatctgaacagaattatgtatctgtaaatgaatctattgaaatggaagttgaaacacaaggtattccaatggaacaacttcttgctaaagggaaaagcatgttttcacacgtaaattttaacaaataaacaactaatttttattcaaatgaaaaagtttttttcaaaaattgctcaaagagcattcgctttagccattagcataatggtagtaactaacacttttgcacaaggtgctgcgggaattgatgcagctagttctgaacttgcaacctacatggaccccctaggaaacatgatgatgatactaggaggtctagtaggattagttggagcagtgcgagtttatttaaaatggaactctggtgaccaagatgtacaaaaggctgttatgggctggatggggtcatgtatctttctggttgtatcaggtgttgtcgtaaaagcattcttcggaatctaatatgtcgaaagagtatccaagttacaatgtatataaggggctacaaaagccccttattttcaaaggatttaaaggcaagttcatatatatcggtggagcttgtattattagtgctttacttttatgtgctattgtttctactctggcttcttttatgtggggaggtataactcttgtaatagttatgtttggagggttaggaataacatcgcaattacaaagaaaagggcttcacaggaaagataaacgaaaaggcatatatatagtatcacgcacttttataagagatagaaaaaaataaagcttatgaaaaagaaaagtgaatttgaagctccttatattggtattgaaacaatagacaatactcctatattctataaccgaaggggcgactattctgttatcattaaatgtgaaaatcctataatacagtattcagcagatatggatgcttactatgattttcaccacttatttactaatatcctcaaagtattaggaactggatatacaatacaaaaacaggatattctatgtaaaaaatcatttttaccaccccagaataggaagaacgactatttatcaaatcgttattttgaacattttaaaggacgaatatatactgatatttctacttatcttgttattacaggagaagtagaaaggtctaaattcttttcttttgaccctcgaaggtttgatacttttattagaaacatcacaaaagtattaggactattcgctaacagaggaataagagctaaactattaaatgaaaatgaaatagaaatatatataaaaagatttctatctatcaatttcaatcagcaaacagtaagcctaaaaaatatcaaagcaagagaagaaaatcttataattggagaaaaaaacgtacagtgcatttctcttgtagatattgacgaagttaattttccttctgttataaaaccatataaagaggtcaatattgggctaaggtttcctgttgacttactctcttttttgcatgatacaccaggtatagacacaattatctataatcaagtaataaatattccagaccaacgaaacgaagcaaacaaattagaaggcaaaaagaaaaaacataaaggaatgcctgaccctgcaaatgatttatgtgtagaagacatagaacgagtgcagtcggatattgccagagaagggcaaatgcttgtatatgcacattataatataattcttgctggtcttgatgatattagtaaggctatcaactatgttgaaacatctctttttgattgtggcattattattaataaacaatgcttcaaccaattagaattattcgaatgtgcactgccaggaaacgcaatcaacctaaacagttatgacaaatttctaacaacttccgatgctgcaatttgtcttttgttcaaggaaaaattacaagtaacagaaaacagcccttttcttacttattttacagacagacaaggattgcctgttggaatagatatgtccgggaaagaaggtgagaaaaaatatacaaataactccaacttctttgttttaggtccaagtggttctggtaagtctttctatgtcaactccaaagtaagacaatgggttttagataacactgatattgtattggtagatacagggcatagttattcaggaatgtgcgaatactatcatggcaaatacattacttattctgaaagcaagcctatatctatgaatcctttccgaattactgaagaagagtataatgtagaaaagaaaaactttcttaaatcattaattttcctgatatggaaaggtgcaaatggtgaggtcaaaaagcaagaagaagaaattatggatattaccatagaaaaatactattctttctactttcatccctttaatggttattcagacctgaattcaaacagacaatgcaacagtgtcgaattcattgttagttaataatttatatttttcctttggggtcatgtaacccaatctttttctcggtcttgagtttaagatgttttgaacgcgcattacctgttcattggttatgtccctaaagtccgtacccttcgggaagtattgcctaatcaaaccattgctgttttcattggctcctctttcccacgagtggtatggttttgcaaagtaaacaaaaatatttagtttacgtgcaatttcttcgtgaaaactaaattcttttccattatctgccgttattgtatgtatttggtctctaaaaggttccaaggcatcgatggcagctttagttagcgggctggcatctttcccgctaagtagtcttatccatactagtccagttaccctgtcgtttatagttaatagtgctcctttgtgattcattccaatgactgtgtcaatttccaaatcaccaaaacgtactttcttgtctactatcgtaggacgcttgtctatgtccacgcggtttttgataaaaccacgtccattagtcaatgcacctctcttcttatgacttcttccccgtcttcttaaatgcttgtataacaacttatctccatgctttttatcttcccaaatatactggtagattgtctcatgagaaactgtttccaagccctttgttcgcataaacccagtcacttgttctggactgaaatctttctttatgagtatatctacttgaattttcaagtcgtccgtaaacttcacgaagtgctttcgtgaacgcattctggacatatacttagcctgagcgagatccggtttgtaaatgccattacgtttatcactattacgacgtaattcacgacttatagtgctacgatgaactcctacaagattggcaatctcggttcttgactttccgctttgcagataagcggaaatgttatacctttgttcttcggttagctgtttcatattgcaactgaatgttggggaactggaagatgcaaagaaacaacttttccacaggggaacaaaagggaaagaaatcttctttctctgttcctctgaaaaattattcttttcgtatcttctcattgtcatcattctcactcctgttgcattatccgcttgaacttaggagatgcggaaaaagaagccatacgtgaaaatttactactcgaatttcaagtcaatgaagaagaatttgaaaacgaaagggaaaaagaagaacgcaagatactttccgaaaaaatagagaaattacagcaactagtagaaaaaggagaaggcggagaaaaaaccaacgcagaaaaagcgatacaaaacattctcatcgaaaaaggctttacacgccaagagcttgataatcctgaaactagattactttctataatagaaagacgaatccagaagaaggaagatatattgaaagaaataaaagttgaaagcttatcttttaactctttctacgaattttccctacgcattatacctatcatttgcaaagagaacaaaattgattttgatattactaactataagtttctattaaaaaaattctataaaggaggacagttagaaaaaactcttaatgaggattttgacacttccctttttgaagaaccctttatagtttttgaaattgatgcaattaaagatgaccctgaattatttccaatagtaaccttaattattatggacgtttttattcaaaaaatgagattaaaaaagaacagaaaggcattaataattgaagaagcatggaaagccatagctagccctatgatggctggctatatactctatttgtataaaacagttcgtaaattttggggtatggcaatggttgttactcaagaactggaggacataattagtaatcctgtagtcaaaaactctataatcagcaactccgatattatatgcctattagaccaaagtaaatttatagacaaatatcaagaaatagcaaatcttttatccctaacggaagtaaatcaaaagcaaatatttaccataaatcaacttcccaataaagaaaaccgtaatcggtttaatgaagtatttataaaaagaggaaattatggaaatgtatttggagtagaggtttctctacacgaatatttcacatttactacagaacgaattgaaaaagatgctgttggatattatcatatcatttatggtagtttccaaacaggattggataattttataatagacctaaaatcttccaaattaaaaaatatggattgggttttacaagtcaataaggtactagggtatcactccgatgatggaagcctaaaagatatacttaacatcataggggaacaaccattatataagtatatcctagataaatacaaatggattacaaaccgttaaagataatatcatgaagaaaatcctatttattttagtggtagcatctactttaacccaagttgcatattcgcaaaaggcagtcttggatataacctgtatggaaacacttatagctaatcataaggtgcaacatacttctttctctaaagtgaaagagaatgaagctcaaataagccttatacaaaaacaaatcagtgaaaaaatggttcagattgaatttttccaaagcaaattttataatagcctaaaatctgtagaagccatcataaaaacaggaaaagatattatctactgcactgatattgcagcagatattggtaaatatcaaaaacaaatggttgaacttgctgtaggtgacccggctttattattggtgtcagcaaaaacagagctagaattagtaaatcgcactgcggatttgacacaatacatttatcaggtcgctattgtcgggacagatgtaaaccttatggataataagcaaagaatagacttgcttaagtatgttattaatgaactaagaaacatgagaggtatagcatacgctgtatgccgacagatgaaaacagcaaaaagaaatggagtattacaaacattagctccgggggtatttaaatacaaagataatcgttcaaaattagttgatgatttattacagaattataaagtaaaacctaaaagataatatgaaaagagtgcttttatttttttccctaatgttgattattggtacttctaatacctattcccaaatgcctgtaaaggataaagggaaatggagcgtgcttaataatatggaatttatggatagagtacgactacaaccagaatggtatcattactggatatggtataaaaaggttttgggtattaaaattcctttgccgggcttagggttacacgacaaatacgggaaggaagatagacgtaatttccagttacaagaaattcccatgatggcagccgtagagtacaataaatcagaaacagaaaaagaagggtataatgttgataccatatatagacaggaactcttcaaatttggagataaagaaattgattatcaatatactttaaccttaattccgcaacactattacaaatataactttttaagtacctgagcaacaaaaagttgctcaggaatttgccatgtcagatttttcacctatcttagtgttgcaaatcaaaatatgtatcaaacccgacagacatggcaaaggtagcaattaaatccgagaaactcactccttttggaggaatattttcaataatggagcaatttgactccagactctcatctgtaatcgactcaaccctcggtatgagatgcaggctgtatggttatcaatacagcgaaatcatccgttcgcttatgagcgtttatttttgtggcggctcatgcatcgaggatgtcaccactcatctgatgtaccacctttcgcttcatccgacacttcgcacatgcagtgccgacacgattcttagagccataaaggaactgacccaggataacatttcctacacatccgacactggcaagacctacgacttcaacacggcagacaagctgaatacactgctcctcaattgcctattgtccacagggcagctgaaagagggcgaggggtatgacgttgacttcgaccaccagttcatagaggctgagaagtttgatgcgaagcctacatacaagaagttccttggttatcgccctggcgtggcggttattggcaacttgattgtcggcattgagaacagcgacggcaacacaaatgtccgtttccaccagaaggacacgctgaagaggttctttgaaaggtttgaacaaaacaagcttattatcaaccgtttcagagctgattgcggctcgtgttctgaagagatagtggaagagattgctaaacactgcaagaccttctatatccgtgctaaccgatgcagttcgctctacaatgacatctttgccctcagaggttggaagaaagtggaattgggcggcattgagtttgagctggcctccattctcatcgagaaatggaaagggaaggcataccgtcttgtgattcaaagacagaagcggatagacggcgaactcgacctgtgggaaggagaatacacctaccgctgcatccttacaaatgactacgagtcttccgagaaagagattgtcgaattctataacctccgtggagggaaggaacgcatcttcgatgatatgaataacggattcggctggaacaggcttccaaaatcctttatgggagaaaacacggtgtttcttctgcttatggcactcatacgcaacttctataaattcatcatggcgaggcttgacgtgaagaggttcggactcaaagcaacaagccgcatcaagacgtttgtctttaagttcatctctgtgccagccaaatgggtcaggacatcaaggaagtatgtgctgaatatctattcatgcaacaatgcttatgccaatgtgttccagaatgactttggataacaccgacaacttatagtcgtgattttgcgtattgcctcaagtcgcatggtggggtaaggggcatttatatgtctttatggtgacattcgatgcactgtgccccctttttactaacgatgcagattcttttcgcttctgtatcatattaggcgcgtagttgcggatttgaggtttaactaaaaatcgtagaaatgatattcttaatgatataaataaaaaacttgtcgaatattcttctaatggcggtaataaagaacatgttgaagttataactgatgaagttactagaataaaaaagaacatagatataatccatgattcacatatgagtaactctaaaaaaagggaagcctatttagattttgataaagaactaatagaggttctttcattaataacaagattgaataatataaataaaacaataatgagccatgaatgagttaatagataaattcttatttgaattatttgatggactaagagataaaacaactgttctattcggagaatttattgcggatgcacaagcattggcagcaatctttatgttgttatattttggagtagaaagcttcaaaatgatgagtggagataaaaaattagagattatcccgttattgcgtccattcgcactgggattggttcttatgttctggattccctttattaatctaatcagttatcccggagagttattaacagcacgaagcaaggctatgtttacgaatcagatagaagaagtagaattactttctcgtaatagatatgcactcattgatagcgtagcagtagagttattacatacttcattagaagttgaaagagccgaaaatgaagttaaggataagaaatggtatgattttagtatagacttctcagctattggagacaagatagctggattatatgtatatgtagtcgctaaggttaaaatgataatgtttaatatcattgaatttattgtcgttactttttggcaagtatgtacctattttgtctttttcctacaaatcatattcacaggaatattagttattcttggtccactagcttttgcattctctgttttacctgcatttcgggatgcttatatacaatggatagctcgttttgtcagtgttagtttatattcatgtattgcatatatagtattatcaatttctttagtagtaatgcaatatgggatagaaagagaaattgaaattttagaatatgcgcttagaaatgaagctgcatttgtcatgtatgtcggaatgacctctggaggtgtcaatagcttccttcttacagcattacttggagcatttgccatgcttacaataccttttgtttctacatggattgtaagtacaactggagtagggcaagcagtaggaggcatggttggaggagcagccatcgcaaccaaagctgtagcagctccggctacaggtggagccagtgcagctatgtaaaaagattcattaaattttaaattcacataatcatgattattaaaaacttagaaaataaaatcaaattagccggaattttatccattggctgttttgcaactagtatagttatttcaggtatggtactagccttttgtttctctttagtaaaagctgaaagaaaaaaaatatatgttttggataatgatgtccctgtactagtaaaacaaactggtacagaagtcaacttggaagtcgaatgtaagagccacataaatctattccacactttatttttcacattaccaccagacgatgaatttataaaatacaacatggaaaaagccatgtatctaattgatgatagcggattaaaacaatataataatttaaaagaaaaaggatatttcaacaccatattagcgagttctgcaacagtaacaattatgacagatagtatcaaggtggacatgaacaacctatcttttgagtactatggcatccaacgtatagagcgagaaacctctattctaaaaaggcaacttgtaactacagggaaattaagacaaattccacgtactgaaaataatcctcatggacttattatcacagattggaaaacgatactaaacaaagacctagattataaagtaaaaaagaatttctaatgaaactgtttaaacataaaaagaatgatagaaaagaaagtatcaagactaaagccgagcaagctacagttgttcttcttactaaaatatttcaaaagttcggagttaataacgcttgtgaacgcttattggcgtgggctgatatacaccgtaaagctatgtttggaattacgatttcattcctttctttcgtcacaattctatcattagtaatgcgtccagaaagaaagccaatgcaagttttcaacgaagaaaaaagcaaagtacaaattaacattgatagtaccctacaaaaaaaacaagtaggagttcacgacttgttagaagtgattaaaatgcaaaatgaaattaatgagctaagaaaaaatgggaaattaactccagaagacactatacgaataaaaaatttatacaataaattaaataaatagcgtatgaaacagattgatattaaaaagcctaagtacatcattccgatactcatcctaccttttattctagggataggatggctagttaaggatatgataaactctgccccagcagaagaaactacattagtagaaacggaagaattaaatcttgatattcctgatgctaatttagaaaaaagagagataaaaagtaaatttgaatcactcaaaggagctttcaataaatcttctgattattcatcaatacaaaccatagataaagaagaagaagttagcgaaattgaaagttctggttctctttactccaatgatgaaataaggcaaattgacagtttaaatcaagcttctagaatccgagaaaaggaattggaacaacaaataaaaggatttcctactatagatgaatcaagtcaaacagaaactaggaaagctcctgaaaaatccaagatgcaagaagaaatggagctttttaaaatgcaaatggcttatatagattcattacaaaatccacgtcctagaacacctcaaaaaaaacaagatgaaaagccaaaagaaaaggctatagaagttgtaaaagcgaaaaatcccgcagaagtatattttaatactgtagggaaagaacaaaaaacttcactaatcacagctatattagatgaaactttaaaagtaacagatggtagccgagtacgcatacggcttctagatgatataatgattaatgacgctcttttaactaaaggcacttacctatatgggaatgtatctggctttaaagctcaaagagtacacattaatatttcctctataatggttgatggcagacaaatgaaagtagatttatctgtatatgataatgacggacaagaaggtttctttgttccttcatcagcttttagagatttgagtaaagatgttggagcgcaaataggaagccaaactatacaaatgaacagccaatcagaaggagtagaacaattcgctttaggtgctttacaagatgcttaccgtagtacaacccaagctctttccaaaaacatcaaaaaaaacaaagccaaattaaaatataacacacaagtttttttagtaaacaacaaagataaagaacaataatatgagaaagatttttattgcattatgcacaatggtttctgttattacaggaaatgcacagaacacccctattggagaaaacatcgagcttgcaggtgaaaacccagaagaactaaaggttatatacgtcaacaaagatgtttcaacgcattttatagctatggaagatataaaatatgttgatatatcagtcaatgatattgttggcgatattcctactggtaactctcttagaataaagcccacaaaagaaggagctagtggagttatcaccattgttacagaaagatttttcgtacaatatatgctagtatatagtagcgatttagcaaaagcatacactcgctttaatatcccttatgctgatttacgtagctatatgaatccagaagtgaacttaaccaaagcacaaatgtatgattacgcacatagaatgtttatttcaaaaaataaattctatgatgtttccagtaaaagtaacctaatgaaaattgtactaaacaatatctacacattagataagtatttctttattgatatttctatgattaataaaacaaaaatacgatatgatatagaccaaatacgcttcaaaatagaagataaaaaacaaacaaaggctactaattttcaatctatagaaatacttccattgatgcaagttaataagaatcttgttttcaagaagaactatcgaaatatttttgtctttgaaaaatttactttcccagacgaaaaagttcttaccatagaaatatctgaaaaacagatttcaggacgtactataacattaagaattgattatgcagacattcttcatgcagatgcttttactgaataaaattttacgattatgaaaagaatagcatttcttgttatcaccttatttttttccctaaagtcaatggctggtgatggtgataagttttttaatatttcaggaggttggcaatggaaaaataccgtcaatgcagttgtagggctggagtttgaaggtaaatatcacaatgcttatgaactatatattgatttagctacagcatatgataaatgcccggtatgtaataaggtatgctctgatagtttctggagctataaaacattcggcataggtgcagcatataaacctacaatctcacgaggcaaaaacagtaatttaagatggcggtttggagcagatttaggagctaacagaaaagggtttcaggcttccattgatataggtttagaatatagctattcatttagaaatcctgaattcaaacagacaatgcaacagtgtcgaattcattgttagttaataatttatatttttcctttggggtcatgtaacccaatctttttctcggtcttgagtttaagatgttttgaacgcgcattacctgttcattggttatgtccctaaagtccgtacccttcgggaagtattgcctaatcaaaccattgctgttttcattggctcctctttcccacgagtggtatggttttgcaaagtaaacaaaaatatttagtttacgtgcaatttcttcgtgaaaactaaattcttttccattatctgccgttattgtatgtatttggtctctaaaaggttccaaggcatcgatggcagctttagttagcgggctggcatctttcccgctaagtagtcttatccatactagtccagttaccctgtcgtttatagttaatagtgctcctttgtgattcattccaatgactgtgtcaatttccaaatcaccaaaacgtactttcttgtctactatcgtaggacgcttgtctatgtccacgcggtttttgataaaaccacgtccattagtcaatgcacctctcttcttatgacttcttccccgtcttcttaaatgcttgtataacaacttatctccatgctttttatcttcccaaatatactggtagattgtctcatgagaaactgtttccaagccctttgttcgcataaacccagtcacttgttctggactgaaatctttctttatgagtatatctacttgaattttcaagtcgtccgtaaacttcacgaagtgctttcgtgaacgcattctggacatatacttagcctgagcgagatccggtttgtaaatgccattacgtttatcactattacgacgtaattcacgacttatagtgctacgatgaactcctacaagattggcaatctcggttcttgactttccgctttgcagataagcggaaatgttatacctttgttcttcggttagctgtttcatattgcaactgaatgttggggaactggaagatgcaaagaaacaacttttccacaggggaacaaaagggaaagaaatcttctttctctgttcctctgaaaaattattcttttcgtatcttctcattgtcatcattctcactcctgttgcattatccgcttgaacttaggaatggaatgcaagtctttgtaatgcaaaaaaatgattttgtcttttggacacgtgaccatttccgaaatggattattagtaggtgtcaaatttccaataaataattaagtatgaaaaaaatatatataattctattatccattataggggtaatatcatcatgtacaaaacacgaagatattatagacacatcattacagccgggtagtatcttatgtagtgatggaagtatagtgcatccctcacttttttcacccaatgaaaaagaagccattggagttgtattttggtgtaatgatgggaataatcctgatataaaagaaaccgcttatgccgtttcattagaagatttagaagaaaatcctttaatagatacagacgaggatatagctaatgtttcggaagatgaaaacagctttgatggagcagctaatactgccgcaataatgaactttgctataaaagatagtttagcttatccagcagctcaaaaagctatagaatacgcaccaaaaggtgttacaggttggtttattggctctatcgcacaaaacaaagcaatctctaataatcttgaaaaggtatattcttctttctcaatcattggaggaacgcactttgatggttggtactggagttctacagaagatggagcaggaaaagatactcctaaagtgtttgcactaatttcttcattaacaaaaggaagagcaaccagtacaagcaaaagaaattcatttaaaatcagacctattatagcaataagataatcatgaaaaagaaaataattatactagcagccttcgttgttacattttttaccgcatgtacttcaacgcatatgataactttcagtaacgctgaactaagcgacaaagaaaaagacatgatagaaaataatagtaactattcaaccgcttcaatagttggtggaagtgcaaaattagttaaagaggaaagagataaagctatccaagaaaagatagaagctagaagaaataaactaaaagctattgatggcttatcaatctccagctataaagataaaaatggaaaagaacagtttaaagcaacagctcaaagtgaaatcctattcaaatttgattcatatgaattaaatgaagaagctcaaaaaatgctttctgacttatgtaatatcattagtgaaatacccaatactaagattaaaataattgggcatactgacaatataggagaaaaacaatacaatatcatactttctaaaaatagagcagcagcagtaggaaattaccttagaaccgctggtatagaaacaaacaacataacagaagatggaaaaggatatagcgaacccattgcagacaatacaagtgaagctggacgtgctaaaaataggagagtagaaatatttatcacaaatgatgaatattaaaaagagagatttctattaacaaagaccgggaggtaaaactctcggtctttgttttatagtctggaaagaaattgataccgtacttttcggagttccggcactgatgggcaaacatggcatgatgaaatgataccgaattatcattcctggcacaccctgcagaacgaccttttgataccaaatacaaaaagctgccggaagccggacacaaaaaattgataccataaaacattagggaaaaagaacaaagagaaaacactatatataaataatatatgaatatataatatatgaacctataaacatataatatatgattaatatactccacttccagaaagagcaacacgaagaatcttcttttccctaaagttctttgtgtcgtttctctctatatctgaatacagaaaaacggctgcatcataaaagaaacgataccgacaccattcaggaactatcgcccatcagcaaaaggattgcatctaattgataccttttctgcctgcactggagagaaaccgggaaggtatttgataccgtacttttccgggttctgcccggcatggacgataagagaacattattatgataccaaaaactttagggaaaaataaaac

SEQ ID NO: 165 - DNA, 40295 bp, Phocaeicola dorei
  source 1..40295: mol_type = genomic DNA
atatatagttgaagaacaacgctctgaaacattccttgtcactattaaacaggcacaaatatctcccctttacatcctcaaagaggatataatacaggcaggaattaaccccgaatctatttgttctgatgatttttgaatggcttaatttttggcgtacttgtttttccgtcagcccttcgatgtatatcaaccctttcatgtttcccatttgtccgggcgtgatcttgagcgagcttagtagttcgtttaggtcaaacagcttaggagtgtttgacaaagagtttagggactgttttcgctgtgtcttttccattgccataatgtttttgcttgtgccctacaccaagccaataaacataaaaaaagcggaagggcattcgcctatccgcaagcgagggagtccaagccctatacacacaaacaggagataccccccgcatatcacggggagcatttatctgtttctctgtgtataatgcaatttttggacttttcgcttgcacagaaatcagctaaacgctttttttcttcaatatgtaaaaacacggtcggtttacgactgcacaaaaataacaatttccctataaaaatgtttcctatttagaataattttttcttgtttatcagataaacaacaagctacatttctatatactcaatattttccaaaccatataacgggatgatattccgaaagaacacatctattgctagaggatggttttgaaaagcaagaaaagatttccccgctacggattccagccggtaaatggtcacttcatcttcttccccaaactgtttccttaacttatcattgatcgttttctgcatcttagacataagtttaaccaccgtaacaggattccaacgatccatttctacagtcacctgcttactgtcggaaaaaatagaaatgcttttctcaattcctttagaagctatatagtaagaaaagaacaaaagagcttccatgccgtttttgcctacgtacagattgatcctagcgtttctctcctgcgctttcttgcagacatgcgcacaaaggataggattagaagaaggcagaagataagaagtattctgctgctctgtctgtccttctaatatactaaagatagcaggattccagcacacgtttacgacatcagaagttacatcttcatatatcgctgcacagcaaatatcattgtcaaacacgagctgatactctttactttccgggttgaactggtaaaagttccgaatcttatgcgcactcttcagttcaaaaaggaaatagccctcgttatttgaaacctttctcaccttccggatctccgtttttccttcagtaatatcaaagagataagctatcagatcttctttgctacatacgtgatcaaaactaaactccttcaattcctcgctttccgattgcacctgtactttcgcttggatggatatagataattgataagcgctaagatctttgaaatcgaacaactccaaacaggatatcttgtttcgttccggtgaataaattatatactcccggtcattaatataataccggtacatgaaatcgccggtttctaacggctggtatggatttaaaacttcgctgtagttcatgattaacttgttttaaattaaatgcaattggttcgatatgtgtattcatcaatcatatcattaccgataatatcaggtagctcaaaaaatcttgtagctgggcaaacatgggcttcaatctctatgcaaagaccgtcacccggcatataggcacaacctacgctatcgttccagtttatatgcttttgggctgctttagctactttatcgcaagctgataagtattcagcatatttactgtttgctctttttatttttttgaatagtatatcgttcatttccgattcgttatacgttaatcttcatcttcaggcattaattgtcctgcttcataataatactgagaacatatatctgatacttcattagataaatagtcctgtatttccgaaattttatccaacagcttatcacgagtatctatctcttccggatcaatactgaacccagaatactcctcaaacgattttatcaattcgcttacgtttttgaagcgatttgcttccatactaatttgcttcttttttttgcgcattttctattcaattttgttattaatatgataatcctttatttcgctttttctttttcttgttgtccggaagatcttcatcacctttccggtgcttccctgatccgttatctaaagccattgacatggcaaccgggtacatatagataagatccttctcccattcgtgcggattactcgcataacacacgataaccggatcgatgggtgttgctctctcctgttcttttccctgttccggattctgctctttttggaagaagtcttgtatgttctgataggttaatctccttgatacatcagagcttttaaagatttccggagtatcgacatttgtaagggcaaaggatatgccgtatatccctttaccgttgacgtgctcgatcagatttatattatgctccgctagccggtctttaaaatcttcatagctggatgaaccattaagaactgcaaagatcttgttatacagataatgcttttgctcgtctgcggtcatttgttttccggcgaacaaaagtttcccaaaccggtacgattccggaagggctgtatctttcagataaaagcccctatcaggaatgccatatacataatgagatttccccttgtccgataccagacgcatataatacccttctttttccaatcgatcccggaactctttcatgttgccgcattcctgacgcaaacgatccatgacggaaagtaactcgtccttgagtaatggattaaagaactttccttttgataacatatctaacatattttcgtatgtatcttcccccaatatgattttccattccgcattagtataagccttagtcatatcaggattaatcgttttaaaggtttccgactgccctagaagatccttcacccgttcttttgcattatggctgcgcaaagccttgtgcaaagctgtgtcaaagaaatattgccggtactgggattctcccaacgtcttgttccgggaagactttcctttctccataacttcaagcccatgtttaagctctagctctcgcatgatctttccagaacgtcccttgctgtaactatcagagatccacaagccgtttaagtctatcgtagtggcaagtatatgtacatgtcggtggtccttatcatcgttctttatgatggtgtagcaagaatcaccgtatcccattctttccaaatattctttcgctacttcagaaaacttttcgtccggaagatcctcccctatcgggctgctaagaataaattctatatatggtgatttcacacgatcattcagaccagcaacaagggacatattacgatacatattaataagagaatcaccagaagaattatataattccctagctacactgctttcaatcttctttaactgataatcgattttgcggtttaatgcttctcctacaaacgggtcttgtatctccgctatcatattagtttatctgttatttgcttcaactctttaatgtacatctctatactttccaatgaaagacgaatattttcatcaacaggtaaagagttaacatgctttgcaagttgattcaaattagtacctatttttttcagttcaaagacggtttgaatatccgcttttgaagttatcctttcccctaaaacagattttcttaaatacatagaaagtgttacaccttcagctttagctcgtctgaaaacctgttccttttcttcttcagaaagacgtgcccgaataactttagttctattctctttcattctatattcctattctctattctaatgtatgtgagtgaaacgaacatcactcgtcagctcggctgtcgcaaggtgggttttgtagctacaaaaccacaccttgcatatacaaagatagataaaaattataaagcaccaaaactttaagatctatactttcggaaaaatcaacccaaagaactgattccctaattaaccaagtaaccagataacttaacaaaaggaagaactgaaagcacggcaacaaaaaaacaactagttaactagtttatcagaaaactaattaatccataaactaattaactaattaataaataaatcaaataacttattaactagataactaatctattaattgtataattaaccacttaattaactaattagtttattaaatggttatgtaataagattattagttaattatttgttaaacaagctgattaatttgttagttagattattaattcatatattgcgaaaaatttaaactcgtaacgttatgggaaaaatattaccgggtatattcgtagcattcgagaacccaaaaggtggaacaggtaaatcaacattaacagccttgttcgcaggatatgtacatgagagccacgagcagacaggtttaaccattggcgttgtcgatatagacgatgcgcaaaatacaatgggggagttaagagctttcgatgaagcacaacaggaagaggatataaaagacgagtatgaagtaatgagtatatcttcatcagacttcattaacagcatagaatttctcaaagaaagtttcgatataatagtggttgactttccgggaaacttgaaacaggcaggagtagtagaaaccctaatgatgatggatgtggtcattataccttttgctccttcaaaaatcgaagtattgcacactgtaaagttctacaattactacaaggaaaatatcttatctaaacgagaaagtctaggttacaaaacaatagtaaaaggattgcctaacaaggtaacacctaatttgcttgaatataaagagcttatagcaaacaaagacaatttacctttcgagctactgaacaatcatatcaaggaaagcaaagttaattaccaaagaaacctttctacgataataaacaactataatcacacctgtgatgatttcggagaagaaatgatacaattattaatcaattacgttaaaaaatgaaattatggctgaagaaaagaaaaatacaggaaaacccaaaacatcaatgttcgcattggtacaggctggtaaagaagaagctaagaaagttcaaagtataaaatctgtttcatcacaacagacttcagaagagaaaattccggaagtacaaccagcagccagcaccacagaaccagctaaagttgttgctccagtacaagaagaagaaatcattcaggaaaatgagaatatgacagaagaaccttcagaatttcccgaatcatcttttcctaaaggtctttctttgcttttcgctaaaagagagataatagacacggaaacgataaagatacctagagagttccatcaagaacttaaaatactatctacaatgtcaaaagttccaatgatgcaaatgctaggaaatctgcttgaagcatttttggaagaaaataagaaagaaatagcaagctataaacgcaaattcataaacggtactttaggaaaaaaatagccataaggaaaggttgttttacctttccttatcatattaattagtaaatcattgacaatagaagacatgtaaataatcaactaaaaatatatatatgggaataataaaagtgcaatgctcttgcggtatgctatggctaagtgaaacacttggcggttatgataccatttgcgaccatgacggaaagatttgcggtgcggtcaactaccaagatgaacagttccaaatcattcagccggaagaatgcaagaagcacaaaagggacacaatgaaagaactcaaaggggctttgcaacaagttaaaatggaaatagggtaggggatttcctaccttactttccattaagagataaccggttactggttttgttttggttcaaccccaacagaacgcaaatatttatacaaagttctcgtggagatattgagaattgaagcgatctcttttgctgaatagaagggatcttttgacagatacattttctttgcctgctcggctttctttttcgctaaatcatttaagccgggctttcttcctcctgttcttccctcacgttttgcgacttcccaacctgcaaccgttctttctgtacgtaaaacctgatcgatttctgccaacattgaaaatatcgggatcaaaagtttcccggaaggagtggacgtatcgatattatgcgttacatcgacaagatgcgctcccttattcattattagatctacattcgtccggatttccttcatggatctgcctaaacgatccaacgaccagacatataagatatccccagttctaagatcttctaatgcccggattaattcaggacgttctttaaacgctgattttttttcttgataaattttctcacaaccagccttttctaatgcttccaattgcaaagctggattctgatccggagtcgatacacgtgcatatcctatcttcattataatacgaggattttaattcttcattaaacatttattgaggatttcattttatactaatttacattatttagccaatctagagcctcctgcaacgtataggcatattccgcatgataaatatatgaaacttcatcaccttgcctatattcacggtcattgtctgtttctcctagaatgtactccatgtttggagttcctaatcgatgcacacctatacaataggtcagattttccactcgctggctttttttagttgctaaaagaaatatcctttctgtatcaattgccatattattactcctttcttattatttgaaattatcgcaaatggcttatatttaaccaccatccatcagtttctagtacattttccctactattattatcctgtataactatatgatcatcatataatccatatgtatcactacagtctgcacaagtgaagcctatggaaacattgtacttcataaacaactgaagtaaatctttcttcaaatctttaatatcatcatcagtcatatctattatgcttttatcattttactttttgtaaaggtagtaaaataatttagtaaaacaataaagtaaaatgtgttttttcttgatacatgccaaaaaaaacattttacttaacgtataccaaaagtaaaatagctgttgtttctctttctcacctctgattaaatgagattggagaattattactttcctcaaaatatgacaatttgtcatgcccgatagtatttttccgaaagtatgatgatataaactgaaggaaaaatatcatttttccggtcatttcttctgtccccctttgggggattataggggggttaggtttttaggttatattaagaaatatggtgtagccttttacacagctgggaaaaatcacttttcattaattagctaaaaatcaacactttaattttttgcgatatctttaatatggtgtagtattttacacagctaaattgaaaagtgtagtgttttacacagctaaattttcaaaagtgtagcattctacacagctggaaacctaaaagtgtagtgttttacacagctggaaacccaaaagtgtagcattctacacagctggaaacctaaaagtgtagtgttttacacagctggaaatgttaatagaattgaaaagtgtagtgttttacacagctagataatcttttccggttcaggtgtcacagtaggtggatttttaactataaattcctttggctcacgtgtcacagtcggggcattactagttaatccaaactcttcaggggtttttccaaatacccgaaagaaattttccctatatacttcctctttcagtgctttgttttgtggagaattagcccatgccaaataatcttcatacaagtttcgatcagattttatatcttcaactttgttaacccgatctctgcctaccgcacaattaggaaaagctaaaccagcgtatctccataacagatcactatagaatctttgagtaaacatagcggtatagcgttcatcaaaataatcaagcgtttcttgagaaaattcaaaatctaccgtatatgcccatttatcattagcacctttaacgtacttaaattgaaagttggtaaatctcaagtgttcatttatccccttcaaaacttttgttacatttcttttcctttccttattctcttcaaaattgaggttgaacaacttagccaactgatcaacggttaatctgtaactaggtgcatctcctgttttgattttatacttaataagatatatcattttcgatagttccaaatagaaatatcgatatttggaaggtaactctctataatcctgactttcaattagattatagagagtataaacagaatcctttatcagattattcagagtagcactatataatcttttcgttcctttcttggttttaaaatttgtccggatttcaaatttggtaaggatctgaataaatatatatgaagtgccttcgcttgtagaaacaggataagacatattttctaagccaagtttataaagggcggcttcaaaaacggtttctatggggtggcttatttcctccccgtttatatccttacagatataatgaggtgagcgttttccaaaaagatccttcagctgttccttagatagttttctttgaagatttgtccgattataacccattttattacaaaaatcctctattgagaaccatgattcaccaaatagatctctaatatgattcccacaaaggtaaattataatatctagcattacactaccgccagaatcatataagcgctcaattagcccagaattgtaactttcacttaataggcgtggaacccggcttaattctttttccataataaattatcatttatcctttttccgtaactctgactgtacttttttatcgtatgcttcccctcttgatactagatattcaaatttaactgtatcatctacaatcttaacgtggaaaataaagaatgctctataatctcctatacgaatccgatatactgatttataggcaatgagtttcttgcaattagtaatttcatcaataccattagcattcttcacttcccggatcatatcaaggacagaagacagaactttccctgataatttatctactgcctttaaaaatggctttgaatattctacattcatgataaaccatatttctgttcaaaggctttttgttcggcttcactaaccatgacatgcccttcaggttgattcttggaaagaaacgtataagttgttatatcttctaaatcattagcagcggagatcaataagccttccataaaggctttagctgatttcccttccttagctgcttgtacggatagcacagttataacgtcttccggcagatccaacagtttctttctcttatcaatttgggtgtttgagattgttgttcccataatcatttatgttttaaattaataatctatatctttgcatgaattaatcgcccaacaaagatatataacatatataacatatacaatatatataacatatataagttatataacattcgatttttttgatacattgaactatatatacattttttaatattaaagaaatggataaactgactttggaagattctttccgcgagcttattaaacaaagaaagtggtatgtaaattccctacgttcacctattcaggcgaaatatgataaagcgacctttcaaaaagggggcaaagttcctgaagaacgaatccgggactatttagctgccgctggttggaaatgtgttcagcctgaattatgggagaaaacataaaaattacaatatttaaccacaaaatttttgctgttttaaatatttatttgaattttgcattcaatataacgaacctttttttaaactgaagttttctttcctttttcaagatctatttgctacttcaaaaattccgctttctttccttgcaattttgactctatcacgcaaagtatctataataggaatattccgatcaatcccatacatatataaaataggatcggaagcatcacctgatataactttcactgtcttgttgccaaatactaattgcaagaaattttgtttttctgaataatcaatcactctatataattctaaatgttcctctcgtcttgagattataccatgcctgaaaatcagttcatccttagtaataatccactttgtagcaaacagcgtgtctatatatgtgtaacacaacataatccaaacgactaaaaacagcaccattaacgcatagtgtacaggcatttctaaatcccaataaatagcagagaacgggagtaaagatgcgacaacaattatcacaaaatactttgaaacccaataacctagtttgggcttcaatgttatagccgtttggttatccataatctagttctttatattagtatattgtatagactttgtattattctctgaatccggaacggaaactgtattttgatagatctcttttccatcctgatacactgtcattttcaatatagcaccggatttacttttgctaagaataatcccttgagcagaaataaccttcacttctttagaggttatataaactttccgtccgctaaaatactccgttacagaactttgttttaggtctgtgttacttgtttcatctataattgatacgttatccggattaataataatagcttcagctgtataatcatcccctgaagcctctaatactaccttatatacagcagatgtattattaaaaacaggatcattatccgatccaccacaagaaactaatactagagtagcacataacgcaaacaaatgcagcttaatttttttcatcatctttatatattttaaattcagatccatgtgtatgtaaagtaaacaaacccttatatttttctttctagaaattttctctgctatcaaaatcatagctattgccgttgccatcaataagcccaaattgatctgtttctacaataaacaaatcgctcgtttctgataacttgctaaaatctttaaaaaactgaaccttcatatttttcttatttagtcgtagctttcatccttccccagcacgttttcatatcgggagcgagtaaaaactcgccaactctctcctgcctagcctttaaactaggtggaacaattgcatacttgcatttcaatagtttggctaacacctccgtactatctctatccttatactccattttctttttctctatccattttaaattatctttagccttggtgtaatcagagaaaagcggttttaccaaagcacgaggattctccgctctttctatcatctgtacctgttgagcagctttactatccaaatacaataagctgtcggaaactgtaacatctttttcgtcaagcaactctatcaattcaaacttaagatcagtccaagtaccgttttcatcggtttgaagccaatccgctattgccttttcatattcagttgatccacacgaagataaggcaaataataaaactatcaatatcctacttttcatatattattttttttatattttcacaaaaatacctcttttattccttccatgccttatgattatgatctttcggcatgtttttttccttatttttattgtccgtttctgtcttattctttacatcttccaagatcgcatttacttttgaaatgattgaaagataatgttgactaactatttcttccattatatcatactctaattcttctttgccatctcccaaatttacaggtttggaaaaagccggaatatccttatctataaacttacacatattaaattgtgtattaaaataaggtggttttccgccagcgacctttccgatgaagtgaccaacactttgtccggcaacttcacgagcctttactactttctccttttgcagagattcggtcatgcttccagtaccggattcttgatgtgagaacgattcctgtgcttctttcgtttctcccaaaagattttctagatcctttgctgtcttttcgttaccggtcattccataggcttggctaccacaagaagatcgcaggatatttgcacttttctctccataatcccggattgcttgattaaagtcctgtacggctaagattgtagctacattgtgtttacgtgctgtacctataaatacatctataccttgcaaatttaccgttggaaattcatccaccataaaaacgctcttttgtttgccgggattattcatttgcgacatgacaacgctagcgatacaactaacaggaggagatacagcttctttaattgaaggagcattgcctatacacaatagtgtaggatgatccggattagttatatctagtgaatattcttcttccggaagtggtgatagaacccaaaagatgtatttattgttaagcaaaacaagcggagtctgtgcggaagataccgcaccagcggtctgctgctgtgcgcctaaacgccatgcggttaacatggaagacatgtttagcgcaatttccgcatcctcagagagccatttaaagaccagatcactatctgataatgcaaaagcgattacatggggtaaagttcctattccctttgctcgttctttgtaacatttataagcaattgaatatacatagttaatcgcattgttcgcccagaaatcagttttttccttccatgaactttcaaggtttttcattaaggtagtagcgatattacgaataaacaaggattcgcttcctttagggacatatttttccgaaagtacattaacacgaaccgtccgggacatgtctacaaaatttatgaaagcaaaggctggtgtaggtacattttttctcttaaaatattctatactaccgtatgcgatccgggacaaaataggtgaacccggtttactaggatctccttcccaatcatatacaaatccggcatagttacgctctgcacattgatagatgatgcctttaatccagctttccgattttccagatcccggaccaccgtcaatataaagattttgctgtggcttatggattctaagatttccttctactgtttcaaaatcaaaataaaactctgatttttcatgtgatacaccaaagatagatttatcagataccacatgccgtttaaggtaaaaaccggctgtttggataactagtattgtaaatcctataaatactatcggaaaaactaataaattgtaccatgatagaacattactgaagcctaatattagggctattgctaagattaatgtagtggcagtatatacatatttcaaggattcatctcttctcttttgtacagggaataggaaagccaacccagctaataatactacatataggaatcgaaacataatagctttgcgtaaaaactttcccaactgcaataatacagctgggcttggtgaacaaagatcattcaccaaaacccactgaaagattatcacacccccgattattacggaaagcaatataaagacaaatgataattccttctttgctggttccattattctttattcttgctagagagtaattgaaccttatctacactcatagttactgaagggactgtatcaccagtatcacgcttaaagataccgacagtgatttccccatacacatgaaccatagttcctgtttttaaaaactccgcaacctttgtttcgtaatttaagaaacaacagatccacaacgttttttcttcgtttccctctttatatttagtggaaacattgaatgaataacctttctgtgttttcttggcatctgatccaagataacccgtaacatgacctataaacatacgctaaaaatttaaagataattgtttgacttcatttttattttttgattcggaaaattgtagggaaggagtaggatcatccaactttatattaaatatattctgtgcggcaatatatattttcggatctgcatcctttaacgcatcaagttcctttgcagacagtttatatccctgctcctttaggttaaccaattccttaaacgaaccggctagcgcagcagctagagctatattaaaagctggtgataatttttcatcattccgggtttcagaaaaatccttgctatcatctacttttttattctctatatgcttgcattcttcctgttgcttttcctgttcttccttcttcaataactcatacttgcagacttcattcaaaatcatagtgctagccttacctacatcaactaatacggaatagaggaatttaggttcttttttgatcgctccgagccagttttttaaatactgtgcgttttcttcccggactccggaaacgatacctagagaacggcaagaaacagcagcggtaaattctgcgattaattcttcttttgcatatttgggatcaccaaacatgtttttcatttcacgtcctaaacgggtatctataccggttgaatgtgccatctcatgtaacaatgtgctataaaatccttctcctgtatagaattgacctttaaggggtaaatatatcttgtcctctgaaggacgaaaaaaagccttgtcagagaaagaagaaataataggacataaccatgtaccgtgttttatcatgtgatccaactctggcgatgaaaacattccctgctcatctttcaatttaggacaactaaatttatccttcaatgccttccattgttccggatatacttccgcaaagtttgtttgatcaacattgaacacgtgataaggtttagtataaggaataacggtatattctttctgctcttccttagtcaaagccttataatcatccatcgaaattttattccccttatcgtctttaatcataaaattccaaaataggacaggaaaagccgatgctcctttgtttatgtgaagcccttgtttctttgcttgcggaaaagtcatatatacaggtgtctggaaactacgttcctcttgaagaagaaaaagcatgaaggaattgattccattataaacacgcccatcaatattttgtggtaatccatatcctgttgttgtaaaccaaggtttatgccaatccgcatcgacttccgtaagtttcttaaccataagatccgcaaatttttgcagagccttatcatttgcctgaccatccatgacttattgataaaggtgttcattttcatattttagcaaccattcagcagcgttttccgcattcgggctaactccttcagcttgcatatccgcaacgtagagagccgctaaatcttcttgagctaataaaaattcaagatcgtcaatctctccagtctgattcttttctaccaatttgttgtaatcttccatgatatttatttttaagtgataacatttttactttcggaaaaatctattaattataaatcggcaaacattttatttaccgtattggcgagaggacgctttagatctttttctgcactttgttgaccttgtgctagcttaacatctccgagcgtattagcagagcctttcagattaaatatcttctgaacggctatcatcgtattgccagatgcagtttcattcaaagactgaatcaactctttggaaggttgatagccttgttccttcagttgtgacatctttacaaaatcgcctttctctactgcttctttaaattctttatctagttccggagaaaccttagcactagcaggatcagcattaagctctacctttgcttctttggattcttcctttgcttgtgttacttcttccgctttttgcacttcaggtttcatcccaaatagtttttctataacgatagcttgcgtctgatcaatctttgtatcttgtcccaaacctctaataacttcctctgaaggcttgtaaccttcctctttcaaactagctattttttcatagtcattcttgacaacggcttctcttaactccttgtcaagatctcgatcaggaacaggatccttacccgttactttctcctgatattgttcccggatcttctcgactttaaagccttcttctttcaattccttttcagttgtacctttggcgattattccttctttttctaacatatccccagcctttaacctaatgcgtgcttcaagatcataattatagtttttatccggattttcatctttcagataagataggtattccttatgttctgtggcaaaatggctgtttattaattgctcataccttttatccttcaactcgtctatatcgatttttccggtacgctgcatatcctttagcttatcattaagatactctttatcctttgccatttctcttgcctgtaaaatctgctgtgcctttgtttccgatattttctggatgtttgagaaagcatatcctttcttatccggaagcatagctatatctgtaattatgtaaccttcaggagtgtggatcattttgttatctaaagaatgaccattcgctaaaagatacttatctgctgcggtcaattcgtaatctccaattttagcaggaacagacaattctttttccgaacgtaccaccacagcgttgagatccttatcgacctgaagaagtatatctcctttttttgttgacaagactatcacattgccatcaagtagatcttgcttctgttgcttcgataatttctttccgtaaatgcgatccggtatggttaacgcttccttcctatatataatagaagtaccgtgttcatgcaaccgaactttagctggtttaccattgatatccattaatccggataatacacccttctctaactttgtgcctttcccgtctaacgagtaaccattttgcaaagcatactcatatagttcttttccggtataacagattttatttttatgatcgatcacagtaaaacgatctttggcatcattttttagatcaccccagttaacaatatcaaccccttcattttttaatacgcttttatagtcgggagataaagcctgatcccgattaaagaactggcaaacacgatccatagaagccttttccgcagataaatccggttctcgctttgtgtgtgaacgtatcttatccatatcgatacgaaatacttcgtcattccgggtaaaaagcaaagaacccttgttataggcttctttgtaacctaaactttccgcaatcgccctaaattgcccgacattattatattgatattctgttagaacctcttgtagcttcatgacaattattttaataattcagcggacaatatatattcattcaatatagataatttcatatgccttcccccacctctttcaaacatttcgatctcaaaaaccttatcatccgggatagtgaacttattgaatgctaggacaaagcgattttggcttttgcccaatatctttttatcaaagtctttttgttctaccggatcatacggaacttcctgctggatagagttcttaaccttcttctgatcacgaaggaagcatttaataaaatcaacgtcataatctatatttgagaagttttttatatcaaatacaaaaaacatgaaatcatcttttacatataggtttgcaagggacatctcaaacttattttttataactcccaagctgaagatattacgctttttatagtgcagtttattgataagattatccatctctatgctatttacatcaatgtgtgcaatatatttgcgaccatcgtcaaagttgtaagagtaagtaagagcatggtctttaaacaaggtaatttcataggtattcagatctttatcgataacaaacagattagaaggttcaaaggcatcaaaagttgtaccaactttaaccatattattataatactcaaccccgaaaacttcttcatttccttgtttcagatataacacatctgctggaaaaaacatttctgtagtattgttattattgactattacgttataacaacgtgatctatccacatcaccggcatatacgatatttccgcagtgatccgtcattcccggtaacagataggatattttataagaatagacattcccgtttgtacaaactatgataaggtttgtcgttcctgaaaaatcttcttcctgtgccgttatgcggacaacattaggaacattatccacccgttccacttttacataatcttcacgaccatacgaaatgtcacttacttgtgcaggaagtactatatgtttcgttttatcaaacgaaacataaattgtttgggagtccagttcttttttttcctgtgcagaaatggagaatggaacacaaaacatgattaatataaaaagcaatgttttcattttacaaaaccaataaaaatatttataatccaaagcagaacgaaacaagatattaaactatacatcagtactttcatttctgctatctttttccctttagagcgttctataaagaacctataagccaaaaatacagtagctacagctaccataaaattaagtatatcaattatcattataatgcttcaattagttgggttaaaggattctttttctttggttcattctgctgcatctgcatttctctatacagacgttctatttcagcttcttcttcctctctcttttttctgtcttcattagtttcttccttgatatacatattatagttagcttttaaatgaacctttacttgagaaaggctttgatttaaaatttgtctagtaacctgtgtagtggctgtgatcgcactagttacctcacttgttactgtgccaatagaagaaatcggaagctgcacgccttgaagcaagccctgttccatttttcgagcagcttcagctttcatgttattgggtaaattcaatccctcaatcgcatcagaatcataaatagtaaaagcgacaggacttatatatttcccatatcgtatgttctctaccgtaattttcaaacgagtagagccgacactagcatttccgtagaagatcgtatttgcagggatctcaacgccaccaacccataaaggctctaacaagcgcatccggacagcacttccactaacaatggtctgatctccataaatagcagctttgataagattgactttttggtcaatagtaaactgtgaccggcgacgccgttttccattttccactataaaagtcggctttgaagctttctcaactttaggaacagaatcatttactttcggaaaaatattctcttgagatttctctatatcttttcctgatgcttgatcctgatatttctttctcatttcatcccggaatcttgcattttcttctagctctttgcgtattctttcctctttctttgcttccttgactatctgattaaaggtttcttgatcctcaatatcatttagttgttggcgcattttatcagaaaatgcactgttagatttttttcctcgctccttgtattcgctagtaacttcgtccaatggatctttcttcattttttcaatacgagctttcattttctcgttgtattcgtcttcggatgtctgcatttcaaaatagaaatcgcttccttttacttgtgatttttccaattcacgtttcttacgagcagcttcttcttgttcacgtttataagcatctaccttattagcgatcttcttttctccttctgtgtccggttcaagaaaagcctgattcacttcttctgtattggatgctgattcagccggtttttcttttttaccaaagaaaactattacaaacagtacgcccaaaagcagaggtactaacattaacaatttgtttttgtccttcaacgcttctcttaaaaagtttcccatagctccattattttaatttttcttcatctgttatttctcgtggttccgaatatcgaacgtcccagctttcgattttaacaccgtgagagttttcacgtgatcgagatacatcatatagagtaaagttcacagaaatatcacgtgctacgctccccctagcacgatagccggtttgcgtaaacagtatatccccggatatcggaactgtttgcatattgatatgtatatccttgattataacgccatagcgtatatttttctgaatcaaagaattaagcatattaatatcgttatattcgttgtaaagctcttttcctcgattaccaatcaaattaagagctaatgttacgttattctcataagtgctttcatcgaaggagtaccacagcgaaacaaatgttttgatatgattttcatattcatactttcgcatcgctgcggattcaatggctgcaacatcgtaaacctgtcctgaagtatcaagtactaaagccttcgtataagccgcatctatcttgtttgacaaatagaagaaacagacagtaaatgcaatacccataatcagacaacaagaagatgcaacaatcacagttgttttaaaagcctgatccactgttttaaattttgtaagattcatatttatttattcttcgttatctataacacttttacctaatgaagcagcagcccctacatttgtagccccccctgctatcgctgatcctgcaatcgccatcgttgcagcagcagttacaatagataccgttttagaaatgattctaccggcatcaccatgaccgactatcttacttgccaaccagaaacaacaacaataagaaccgatcaaagcaagatccatgcctaaatattgtagctgttttgtcgcttcatctactgcgttgaatgcgtcagaatcataaattgacttaaatgtaaaccacattatctgatttaaaatattaatcacagtaaataccataccaacggaacacagtgtaccaaaccaattagacagctgcttttggaataccggtagaatggaaaaagcaaaaacgaagggacctaatatgacaaggatctttacaatgacaacgcccaaacccaatatgataatttgtacaatcccgaccagcagtgcggctagagcatgtaagagcattgctgcgaaattggcaggatttaatatttgggagatttgtttcaatgtagatgcactttcatctattttattaccttgatctatattttgtagttctttattcatagcaccttccggatcttcccccgcagcgacttccgcttcaagtgccgttttttcattatcggctatcatggtgtgctgttcttccgctgatctgtctagaaaagccgcaaactcctgtgcccggactgaacttaaagatgttgcttcatttattacttcaagggttccaacaacagtttttgcgataggtgtatatagcgaaagacagaatattaaagcaaaacagcgagctatttccatcaaatccggaaacttattttcatccgatgttaaaagctgactaacaccatgatataggtaattataagctatattacagatgaaacaaataactgctacaccaagcgcaattaccgtcatttgcgcagttaattctgttgtaagggaatcattaatctgcaatccccataaaaaagtatcttgtccgttcataaggctaattaattagtatatcgactaaaagcagataaatttccgctataatatgttttccctacatgttttcgacttgcatcttttatgatctcacttcttactatttcattaaaagatttcatttcagcagaagccgtttctaaggcttctcttacctgtccgacaaaggacattcttccctcactattcatgctgaaatagtcggaaacagtagcaaccttaaataatagatctgtgctcaaattaaggtttaccgtaacttgttggaagtttaaaaactttaaacaatgatagctaccgcctatattcatataaaaacggtaatcactacttagacaagctacatcatccaacagttcagcaagttctactaaagattgtagttggcgtagttggtctatcttttgtaaattttctcgtatatgtgcagcatcaatcatttcattaagctgcttaacccattgcgctgcattcgctccccattcgccaaggttcattcccatgtgagccggatcattaacaacccattgcgcactagccttttgaacagaaaaagagctacttaacagcaacacagaaaaaaataagagtatctttattttcataatattataaatttattatcgcagaataaacactatcgcaaatatcaaagccacaaaccaagcgactagatatgttcttgcattatctttctttgtagctaaagcccagactacaaaaatcagagaaacgcctaacattgcagcggtgatataccctgccacactaaaagacgtattgttaaattctcccgaccatccttttatctggttcaatccttctacagcatcattcatatttttttctcctttcttctaaataccggttaatagcagcataagtagatcctgtttcctcaaaaagctgtttgagcctaaccacagtcgattgtcttgaatcaaaagcgacagcggcaaattcagatacttcattgcgaaaaacataggtttcgtttcccaatttaatgaagaactctctccacttgatctcatcatccctattttgcagactatctatcattactagttcttcttctgaaatagaaagaatatctcgcagattgggcaactcctttctataacttgaatgatccagtattactttagtatcacagtttataagtattgaatccttgatcgccggtggacagttcttcaggaacagtacattttgggcagctatcgttatagccccgtcttttttacggaatgtacgatacaaataggcgataaaatcaccaaacttatcatcacttaaaaagtctagggcttcatcgataatcaattccttattaactccttcacgcttcttgatcttatcgataaccatttgaagcgtgataatcgctaccaaaggaaaatactccttctttgctgcgtcttccatatcaaacgcaattaaatcatcgttaactatatcaatattttcagttgcgttcaacaaaaaggatagttctccatccgtgtaaggttctagtagtaaaagcacttcctctatctcaaatctacgtttttcaaagtcagtcattttgtaaataaatacatctcgcaagaaattccggtattctatcagattaggaaaaatcctttcatttgttccatcaacagaagaattatttacatactcataaaatgcgatcactgattttctaagaatagctttctcggtgggatcgataggcttattttgtttccagatataggataaaagagcacagatcgttttaataagatcctcggctgcttctgcatctgaagtatcaatataaatatatctaccattccgatcacgttcacacaagaacgggttaaaagcaaactgtttctgatttgtagaatcaaaatatttacctcggtgcaggctaatcatagacctgtaagatccaccgatgtcaataattgtaatatcattacccaaagaataagactgataaatatagttgtttagccaaaaagactttccggagccggacggaccgattactattttatttctattgtttaaagccttgttattccataaatttatcaatgcaggatttccgaatcggtcattatacaaatgcccttgcagatcagaaatataaatactatctttttgcaaataacaaatcgcctgtttggtcgtattgataaatcccctataattgctccgagcattccccggtatattagaaaaaaataaattgcacaactccgcattctcgacataacaagaactttggttcataaaactaaatccctgctgtgccaatgaaattttccgaattagagaagaacgatccggatcattgataatcacattaaaagctgtataagctgtttgataatcaaaatccgtaatttctttacagaaaagttcttgctgtttttgcttgtctttagccggaggataaaagttagtcaaatagtttagcccgtttttttcagcattaatagccgttagcgtagtatctgtatctgttatttctatcacaacatttacaatgtgatcgaaaggcaaacctagtccaaccgggtacaacatagaacatttagactgtatattctccggaagctcaatcgtacttccatacgcttttgatttacccgtattgggtacattcagctcataaagattttccccttccacggtaagagaaagcatcgctaaatattcttgtccaaccttcagatcaccgctaggagttaccataattgggctaactgtttcttgagtagcgtcttttgttggtttagcatacgagagattaagataatcaaagacagcattatttaagtctttactatccatcttctttatctcaaattgagttatagaagataacccattttcaaaattcaagattttcggttcaatctctgataacctttcttcatagttcttgtagggctgtttaaaaggataattgagttttttaagcagcgatgtattagaagccttttttcgcactccctttttcaaatctgtattggcaaaagtgatatacaaatttgtatagcagtttattatttgcttgttattaaagtgtttaatactttccgctttcaatggattaacagaaaagtcattgttcttatactggcttacatagtaaaagcactgctgatgcaccaccgttgcaggaggtaacatcttaaaaagcccctctaacctctcatgtatatattttgcatcttcctgcgaaagagtaaatacttccggaagaaacaatctgtatccaatggttaaatctccgctaccgtttactataacgctatccgttatggtctggatcggtagtacagccgaaagatctattgatttatcagatataggaacttcagaaggacgcataaaaagtatggcgagtaatgtaatgacaccacacagtaataatgccgatataataataaatcctatcattttattttgtaattagttaccacatagtagatataaactctctgcaagaaaaagcgacagccttaatctgtatcacgtattccgcaggatttcaagatcatttctgcttcattataaaattgaataccttatgtttatctattatctgtttaggggttgcagatctaaccgataagccagttagataatccggattgccagctttatgttcccgttttaggttcttgaataagatacctgaagcaaagaatatagctcccatgacactaactatgattaccggatgcacatgcttaaatatgcaaacaattataatcaaagcatttgccaacataaatagaccaaattgtcccgacgttaagccaaagaacttaattggtctatttatctttcttatagtcctcattaatcagataataaggaaagctaccataataaccgcaaccgcaatgatccagccgagcagatactccttggcgtggggattattcgttgcaagggaatagatcacaaatactaaagctatgccaagcacggcagctaatacatactttgcgatattaagaatcgtatcagaaccttcttgcgctttcgattcaacatcggacaaactgctaatttttaatgcgctttgggcttctacaacttgaggaacaacaacaaaagtcagcaggaaaagccctaaaatcataataatacgcttgtgtacactaacaaaatctacactctttttcaaaacttgtaccataatcttaaaattttaattgttattttatacatgttatttatatatcaatcttgcttaaagcggaaaaatcaacactttcatatttgacaaaaacatcatctgatttttccgaaagtacttgatgctggaatggtggtatcttaccagcataatagtacgcccggtttgaaatatacatatccgctatctctctacttaattcttcatcatctgaaagatccttttgaaaaactattgttatgcgtggagataaaactagatcagaatcagatttttcttcttcaactgatagtgaagctgtacactccgttttctttttacttccggaaaaatagaccaatcctaaaattagaattgaaacaataactatcgtaactatcgccagatcaaataatgaataattagtggctagatattcagtcatttgtatatttatataagcgaccatattagtataaatattactaatgcaacgatatacgtaattatagcttctttcattttctcatgattagttattattttttttataaccgcaagacctgcacagacaaatccgacaccggctagcatttcgccacattgtttgaataagtcaatcaatgcgcttacatcagctgataataatatcataatcaataaataaggactttaacaccaagattccagactgtattccatttgcttgcatagctaaacggactccaatactgcttaacacgtccaagtatcgcaactcgtggagatacaaagtattctaattcaggctcgatctttaaaccaagtaagaaatcatacttattatcctgcctcttgtacgcttctacacctgtaaaaagacctagacctaggctaaaataaagtgaagaaagatttgtcgcaactgttttgaaataagcagcatcaatatagtaatcttttgctgtagagctaaaagaaactatcgttggaacttccgcagtattgctttcataactgtagttataagacttttcaaaatagttcaaacctattttccagtaagttgttcgactcctatactttgatactgaaaggtttaagttagtattattcctaccaaaaatattcaatccatagtttacttctagggctgaaatacctacataatgccgttgtgcataaacactatgtgtacatgcacataacactagtaataaagttaattttaataatctcatattcagtttaaaaaaaggttcgttttaataaattcaaaaatcaccttctctatatttttcaaaggctatgtacgtgctacttttgccgtaaaaattatgaaatatggttatgcacgtgtatcaactccggatcaatgcttaaatctccaactggacgcattacgtttatacggagtggatcacatctgtgaagaaaaaatatctggaaagaataaaaataagcctgttttagatgctttaattgcaaaattaaaaacaggagatcagcttatcgtgtggaaactagaccgattaggaagaagaacctgcgaacttataaaacttcaagaagctcttgaaaagaaaaacattgctctaattagtctaacagagcaattaaatacatcaacaccaatcggaaagtttgcgtttcatcttttatgctgtattgcagaaatggagcgaaatataatttccgagcgtacaatagccggtttgacttcagcaaaggcaaaaggacgaataggaggacgcaagcccggtctaacagatcaagctaaaaggaaagctaaactagcggctatagaatacaccaagtatctacaaaatgaaataggcacgatagatgatgtttgccggatagtaggagtttccagagctaccctatacaagtatctaaggatagaagggattaacatacagggcagaaaaagataagagaatatttttccgaaagtatattcttaattatctgtctactaactgataatatcaagtttaaatataaaaaatatacttagaaatttgctcaatactatcaaatttgatatctttgaaataaattctaagtaaaatgagtaatataatatctaaatataaagaaacaggcatgataagcatagatcaaccagtaggatataacaccatgaaatcccgtctttacaactggaaaaagcgaggtttgttatcacatattcgccggggagtatatttgccggctaacatacagaacaagtatcagatagcttgcaattccgttgataacggttgcctagcttatcattctgcattagagttctatatgttacagacacaggaatttaactggctttatgtgcacagttctactcccttccggtcttttgagtacctgaaccagcgttatgtatataagcctttgcagtttatatacaaaccattggttacaaaaaaagataccggctatcctatcacggttacatcaatcagccaaaccataattgactgcttaaacaatataggcttagccggtggcattgaagaactgttatttgccttaatcgaggttgatccggattccgtaatagaagaagatatgttagaatgcctgaagctataccaaaagaaaagcctgtatcaacgtacaggattcatcctgtcccagcttcaggaacaactaaacctatcggatatgttcttcgatgtatgtaaaaagaagatgggtaatacaacaagttaccttacaaatccttcccgttgtgatacctatttcaaggaatggaatgtatgtgcgcctaaagatgtaatgaaagaaatagagaaaggagtatattatgagttttgattatacacaagaagaaatcactagactagcaaaagaaaataattttacggttgctggaatagagaaagttatgcgattatccaatatcctcaatgaccttaacaatcagccggagtttagcggtaaattgttactgaaggggggaacggctataaacctgcttgttttcgatcttccccggctttctgtcgatctggatcttgatttctctaaaaacgtatctaaagaggatatgttagcggagagagaacaaatcaacaaggctttagatagctatttccagcagaacgggtataggaagaccgaaagaagtaattttaccctagattctctctctttgcactataatacggtgacaggaagcggagataagataaaactagatataaactatcataatcgatcccatatattcaaaccggaagttaaatctattgagtttcccttcatcagagagaacaagacttcatttgtagtaaactacgtcaatcctatcgaattgtttgcaggaaagataaaggcgttctatgaaagatgtaagcctagagatatatatgacctcttctcccttgcatcctctgatatattgacgagcaaagaagaaagggatcttttaaggaaatccattgttttttactcttctcttggcaatccggagaataaggaaatgttaaaggctgatccaaaacaaagcatagagaatgtgacctttacggagataaggcagcagctacttccgatgatgcataccaacagcggaaaatatcccatgcaggagatcaacgataaggtggctgatttcgtatcttcgctaatgaaattagagccttcagaggaactgtacctgtcaaacttctacgctgggaaatataagccggatcttttgttttctgataaggagatcctgaataacatacaagatcatcctatcatcataagaacacagcaacaaataaccgattctattttttcagattcaataaaaaaaaacgattttacccggatcgctgggctgaaggatgaagggtatatcccttcccctaaaataatagacgagctgaaaaaatccgcaccggctccaacaatgatagcagtccagaagatcttcggtctgtcctctgacgctcccggattaagcaacatcaaactagcccaaagcgataatgtagggctaggtaaagataaaagtaataacctaaaaatctgacgttatgaaagtagactttgacaaactgaaaagggatgtttcccttccggagttttttctctatttaggctggaagtttgtttccggatcttccaactcgtcccctaagatgagcaacggatccgataccgttattatcaagaagaatagtaaggattactatacctattgggacgttcacggagaagcacgaggaaagactatcatagatctaatgcagaagcatatctacgaccagaccgggagaatgcctagcctgcgagaagccggggaagccgttcagaactatgtaaacaataaagaagtcgtattatctcaagatagccggtttggagttagcaacgcaaaactagatcctaatcagctggcgttcctgaacagccaactgaaaccctatcaaggggatttcttgcaaaagagaggaattactcaagatacactatcttcaccggtattttccggggtattcacctctagggaacaccggaaagatggaaaagtctataataatacctgtaccagacttattaaccaaaacggctttcagggtatttcccaaagggggataagacctgaagacggcaagagcttcaaaggcatatcaggcaacaaatacgatagtatcgtagtgtctaagcatgacaagacaagaccaatagagcatatatatatcagtgaaagcatgatcgatgctgcgtcccattatcaaatgaagcttctgaataccgaaaagaacatcttatatatcagcactgaagggaacatcacacagggacaaatgggcgttataaagctgctcctgtcaaagcaaaatattaataatataaccgatcaggttacttatatatttgacaatgatagcaacggctataaatatgcgctgaagctagatacattcttaaaaggtcaagagttacccaatattgaaggtctgccagttgaagaactgaaggataaagttcttcaactgcctaacgtggagttatcggtaaacagtgattggaacgatgatctacaagcatccatatcaaaaggcaaggaatgtgagttccaagatgccataaaaaaaaacgattttacccggatcgccgggctgaaggatgaagggtatatcccttcccctaaaataatagacgaactgaaaggatccgcaccggctccaacgatgatagcagtccagaagatcttcggtctgctctctgatactcccggactaagcgacataaagctagcccaaaatgataggcaaacaatcgggaaaaatattgagcaggcattataatttttccaaaataacaataaccaaatttggttattgtattaagagtcattatttttgccaaaacaaaattatagtcctatgaatataaaatatgaaaaatacttgtcaatggaagatgttccggcaggtaagatattggatgtaatccttaaaaaaaggaatatatctcaaaaaaagttagcgcatatgtcaaatgaatatccgcaacgtatttgtgactatataaaaggggaacgaaaattcactataaaagcctccatttcaatagaaaaagcgttaaacataaacattgaaggctttttctttaaaatacaagccaaccatgacatatataccttcataatgaaagaagagcgaaagaaacatcctgacttatctaaactaagtaaaggattattttgggacacacgaatagataagataaattggataaggaacaaggaatgggttatacaacgggcttttgaatatggcaacgatatcgagatcaaggagattattcggttctatggaatagaaaccataaaacaagtcattcccaacataaaaaacaaatggaatagtaacacaagaaacgataactatcaaaaatacattctatgaacttacattatgaaactgtttctcctttattaaaagaaactctgcaaaagctggtcaatagtcctatttttaaagatttcacgcttataggtggaacctgtttgagcctacaactaggacatcgaagatctattgacatagatttattcactgatatagattatggaaccatgaatacaaaagaaatgaaagagtttattcaaaggagttttccatattccgagaatacagattctctggacacatcagctttaggatatacactatacatgggggactcccctatagacaaaattaaagtcgattttttctatactgaaaaatttattttccccatacaagaaatcgaccacatacgaatagcagacatacgggaaatagcagccatgaaactatctgccattacagaagaagaaccaagacaaaaagacttttgggatatccacgaactaaatgaaaaatattcattcaaagatatgatcgactggggaataaaaaggaacgaatggagtgttacagaggaaggtatattaaatgggtttcaaaaaatagattctgtaaaagaatcacctgaaggaatagattgcttcaagggtaactactggtcattagtaaaagatgatttaaaagaaatggtagatcaatatctaaaagaaaaagacttttttcttgccataaaaaaaaatgactttgcacagatctctttcctaaaggatgaaggatatatcccttctccggaagcgataaacaacctgaaaggatccgcaccggctccaacgatgatagcagtccagaagatcttcggtctgccctctgatgctcccggattaagcaacatcaaactagcccaaagcgatagcaaagaactaggattaaacacagaaaaaagtatctaaacacagattttttccgaaagtataataacgggatcaaacaaccggctaccagagtacccatgcaggaatatatctttccagctggtaagtgcttgcacctatcagccggaaaggtttattccgggtactccttttccgactgttcggatcggtgaaagtcattcggtttaccggatggctcaccgaaccgatcaatcggaaaatagcctaccttattcgggtgggtgggcattatgcgttaaggattgaagcgtttaccatgtagaagcggaaagcctgaccgaagggaacgcctaaaacataaatatcattttgctactctcctactccattttatagctggatctgtccttatgctcaactgtggcaatatcattttgtacaatccggaagattgatttttgattttttagacagatatcactatcattttgctttttatatgtgcaaaggtcagaagcccccagagaaaaccccgccggaggcaattatagaaagtctgtgtatcgtttccacaaaatgtggaaatgatacacagataacagttcttcaataaatatatgtgttttttgtatgcttttgattatcaggtatatatgacttgtttgtttgtttggcacaatgtttgttctttgtctttcagaaaccatatgttaaatatttaaatagattggattatgaaaaaggtattatttgcagtagcacttgttatgggattgggtagttcagtggcattcgccggcaacatggtatcggatgttgagattgtggtaatggtgaacgattataagccaatcgaggtaaaggatctgccgcaggcggttcaggacacgatcaagaaggatttcgcagacctgacaatcaaggaagccgcagttgaggaaagcgaggaaggcacaaagacctacaaggtgacatttaccgatgcagaaggcacggacagcgaagtgttcttcaacgagaagggcgaagtcctgaaataaagcaaatgaacagcaaaaaagagaattcaattaaactgtgtcagcaaaattaatattttattgctttgctgacacagtttgttttacagcccctccggttccggtgacttgtaaggcttgaaagcaacccgaacctccttatgctcatcgatgacgaaagtctgctccggctccacagaacgaataatgacgccattgactttccaatacatgattgtccatgatttggaatgggtagcacgaaaatgcaccgttgtgcctttcgctatttcagccggagagatcaattctcctatcttttccgcagccgtattttccaacttcggtttagccgaaagctgaccttcaccctgatccacaccaaatgccagcactactttttccactgcgggaggaagaggaggatcttcatcattgtcacaagaaaccgcaaatagcgtaagcccatacaacaaaacaacgacaaaagagagataaccgatctgtctcattaagccggtttcttttttttccatagcagttttcataagcttattttttgtttaccctacgcaaagataacaatttgttggctaaaaggggttattaaatatagtgtttatcacttaatgaataaaatttaaaggagacaaaaatgccacaaattcttatagacagaaaaacatgttctaaatgcaatacttgcgcaactgtatgtgtaatgggaatcattgataaatcgacagccttaaattatccaaccatacctgaagaaaaattggattattgtttaaaatgtggtcattgtgagtctttttgtgcacagaaggctcttaccttagatttccttcttgacgaaaaaattaatacgtcttttttggatagtcagattgaaccacagaatatagcattgtatataaaaagtcgacgttctgtgagacattattcttcaaagacagttaataaagagttaattgctaaagttattgatatagcccgttatgctccatctggagggaatggacaaccagtaaaatggattgttattcataaaccatcagaggtaaatcgtgttgcaagtttaaccgttgattggatgcgaactattcaaaacacatcacatcctctagcagattatgtacctgcaataatttcaacttgggatagtggtttggatttgatttgccataatgctccccatttactttttgcacatgttcctattgagccaattgatgaccctaccgaagcaattattgctttgactcattttgatattgctgcgcccgcttttggtatcggtacatgttgggctggattcgtaaagttggctatagacaattataaaccattaaaggatttgttatcaataccagaagaacgtaaagcggcttgtccaatgctatttggatattcaagttataaaataacttctattccgagacgcaatcctgtggatattacatggaagtaaaatagaagttacttaatgactaaaatggtgtattaaacagttaatcttgattcagtaaaaaaaataattttgttttactgaatcagactctaatcaactaacaattaagagggatggtttttttcaggaactctctccaacatttccaaaaaacaacattcccattgttttgcagccaaactaacaatttgacaattaagatttattccatatttatcagcaataactctgacttgactttttctgaatattgtctttaatacagttctggctggcaaatcgggtttttgcaacaagaaagtgagaaaattcagatattttcttttcaattcataacttattgacattttttttctttcaatctttaaaagtgctgacttgacttttggtggtggcaaaaaactctcatgagatatttcatacataagttttaaatcaaaaaaagtatgataaaacacaatatatggattgaaaactttttttgaaaataacttttggacaggttcaagttgcattatcaatgaaccacccataaaatgctcaacactatcaaacatcaaggattttaaaatttcagaagttattctgaaagggatattagacacaactttaaaatttctttttggtatggtgtaacatctaaaatcacaatcaataattttgacattcgtgttgttagaaaacttgttttttagaatggacaatagcgatttatcattctctattgcaattagatttgtgcattgacgaactaaatgaacagtcaaaaatccttttccggcaccaatatctataacagtgtcggattcatttattttcgcaattttaattgcatcatctatcagcactttatctatagtaaaatgctgtcccgtgtatcttacgggcagtttattttttatcattacttatttcttgctgaattcaagttccaaatgcaacggaattcatattaataatttgtttaaatttttcgtttggtgtgaggtatccaagtcttttacgaggtctattatttagattgttttcaatccatttaatacgcttgttggttacttcactaaagtccgtaccctttgggatatactgcctgataagaccgttagtattttcattggcaccacgctcccaagagtggtatggcttacaaaaatagaaattaatatctaatttttgtgctatatcctcgtgttttgcaaattcttttccattatcagccgttattgtgtgtattaagttttttacttttcgtaatgcccatactgtaatctttgctacagggatggcttctttccctgatagcttacgtatccatactctgcttgttgctctatcattaatggttagaatagcacctttgtgattctttccaataattgtatctatctctaaatcaccaaatctttctttttgctctacaattgaaggtcgctgatcaatctccactctattcggaataaatcctctacctgcgtttttagaaccacgctttgaatatttgcgtccttgccttctaagagatttatgaagatccccaccttgtcgtttatcttgccatatccaacaatatatagtttcgtgagataccatagctatattttctacttggcttctgcccactatctgctctgggctcaagtcctttcgtagaagcttttttacacgcttcttcatagcttgtgtaaatacctcctttcgcttcttttcaaccttacgtttatctgcctttctttgggcaagatcagggttgtattttccactacgactatcgcaattgcgttttatttctctataaatattactcctatcaactccaatagcttcagctatatcttttttactcatcggaacttgcaacatcttagaaattgcatacctttgcttttcggttatatgtttactcatctacaacttttatttctttggacggacaataaaaacaaagatagtaacatttatccattcagcagagaacagagggaattgtctctcttttctctctgaaaaaaatattacttatgcagctattaatccttttctttaaaagttgcatttataacttgaactcaagatttaaggttaatatcctgtaggttgcagggagaacaaacgggaacagccgttcccgcccctttcggattgtatgccagcacccctaaaaaatgccttgtcaaagacaagtagtaacacgcctgtgttacgttttcgacttttcagccgtccgaccgccaccccgtccgatttgacttgcctttgaggttatatatgcaaatgcaagaagccccccccggcgaaaaccccgccggaggcttttacaattcaaagggaggtgtttagaaatagacgttcaacataaggtatagtaatgcgttcttatccttagtgtcgtggtgttcaagctcgaattgaatcttgtcctcacgagcgagccagcctatcgcactggcagcttccagatcattgaaccctgtcaattcctttacttcctgcaaattccatttccggtgtacgtctgtgcttaataagcgccagagtttccctgcgttctctctgatgatgtgcttatccatacctgtattttttataagtttataaatggtttcaaatggataatgaaaagcacttttacatcaatagtgttacgcactgcaaacattccagcgtttatcgtttatccttttgatacgttgtatcactctttcctgatatacagcaaaccgtttcgccgttcgatgtatatcttattctcacgtgcgagccacccggcggcgagtgcggtttcatcagccgcaaaatttagccttctcgcaagctcggcaatggttataagtccggtttcgcctaatttttctaagatgatcccggctttaaatcctatatttgttttttccatgataaaatttatatttatgtatcaaaaatatgtatatattctattattcaaaacgtgtagaaatacaaatttaaattcaccccccctattagagaaaattaacaatttgtatatcaagcttttttcatcctcaaaatggaatgactattttagagggtattaatttagtaatacctaagttcaagcggataatgcaacaggagtgagaatgatgacaatgagaagatacgaaaagaataatttttcagaggaacagagaaagaagatttctttcccttttgttcccctgtggaaaagttgtttctttgcatcttccagttccccaacattcagttgcaatatgaaacagctaaccgaagaacaaaggtataacatttccgcttatctgcaaagcggaaagtcaagaaccgagattgccaatcttgtaggagttcatcgtagcactataagtcgtgaattacgtcgtaatagtgataaacgtaatggcatttacaaaccggatctcgctcaggctaagtatatgtccagaatgcgttcacgaaagcacttcgtgaagtttacggacgacttgaaaattcaagtagatatactcataaagaaagatttcagtccagaacaagtgactgggtttatgcgaacaaagggcttggaaacagtttctcatgagacaatctaccagtatatttgggaagataaaaagcatggagataagttgttatacaagcatttaagaagacggggaagaagtcataagaagagaggtgcattgactaatggacgtggttttatcaaaaaccgcgtggacatagacaagcgtcctacgatagtagacaagaaagtacgttttggtgatttggaaattgacacagtcattggaatgaatcacaaaggagcactattaaccctaagttcaagcggataatgcaacaggagtgagaatgatgacaatgagaagatacgaaaagaataatttttcagaggaacagagaaagaagatttctttcccttttgttcccctgtggaaaagttgtttctttgcatcttccagttccccaacattcagttgcaatatgaaacagctaaccgaagaacaaaggtataacatttccgcttatctgcaaagcggaaagtcaagaaccgagattgccaatcttgtaggagttcatcgtagcactataagtcgtgaattacgtcgtaatagtgataaacgtaatggcatttacaaaccggatctcgctcaggctaagtatatgtccagaatgcgttcacgaaagcacttcgtgaagtttacggacgacttgaaaattcaagtagatatactcataaagaaagatttcagtccagaacaagtgactgggtttatgcgaacaaagggcttggaaacagtttctcatgagacaatctaccagtatatttgggaagataaaaagcatggagataagttgttatacaagcatttaagaagacggggaagaagtcataagaagagaggtgcattgactaatggacgtggttttatcaaaaaccgcgtggacatagacaagcgtcctacgatagtagacaagaaagtacgttttggtgatttggaaattgacacagtcattggaatgaatcacaaaggagcactattaactataaacgacagggtaactggactagtatggataagactacttagcgggaaagatgccagcccgctaactaaagctgccatcgatgccttggaaccttttagagaccaaatacatacaataacggcagataatggaaaagaatttagttttcacgaagaaattgcacgtaaactaaatatttttgtttactttgcaaaaccataccactcgtgggaaagaggagccaatgaaaacagcaatggtttgattaggcaatacttcccgaagggtacggactttagggacataaccaatgaacaggtaatgcgcgttcaaaacatcttaaactcaagaccgagaaaaagattgggttacatgaccccaaaggaaaaatataaattattaactaacaatgaattcgacactgttgcattgtctgtttgaattcaggaactataaacgacagggtaactggactagtatggataagactacttagcgggaaagatgccagcccgctaactaaagctgccatcgatgccttggaaccttttagagaccaaatacatacaataacggcagataatggaaaagaatttagttttcacgaagaaattgcacgtaaactaaatatttttgtttactttgcaaaaccataccactcgtgggaaagaggagccaatgaaaacagcaatggtttgattaggcaatacttcccgaagggtacggactttagggacataaccaatgaacaggtaatgcgcgttcaaaacatcttaaactcaagaccgagaaaaagattgggttacatgaccccaaaggaaaaatataaattattaactaacaatgaattcgacactgttgcattgtctgtttgaattcagg

SEQ ID NO: 166 - DNA, 10298 bp, Phocaeicola dorei
  source 1..10298: mol_type = genomic DNA
ctttgggagtttttaagacgaactttccctacactttgggagttttacccttctttttttgtttatatgtaggtattttatatctttgcagcaaatcaaatagttatgaaaaagaagctacctattaccaaaaataaagacgtagttgtatcatgggtatatacatggtccaaacagcaagacatgtccatacacgaacaaagaatagttcttcgcatactggaagcctgccaggctgaactaaagggagtaaagctgaaagattatgcaggcacgaaacgcaaatttgagcatggactttgggatgttgatgcgcaaatgcatgtgtctgacgttattttttccggacgtgactacaacgaaatcatagctgcactcgattcactggctggacgttttttcacttacgaagatgatgaggaatggtggaaatgtggatttatatctaacccgaaatacaaaaagcataccggtattataacatttcgtgtatctaatgacctttgggacgtgtttaccaaattcgcaaaaggatatagggaatttgaactaaacaaggctcttgcgctgcctacaggctattcacttaggttttatatgctcatgagtgggcaggtgtaccctttggatatatcactggacaacttaaaagaacgacttggcatacctgcggacaaatacaaagacaaaaacggaaaagatagaatcgacaacttcgaggaaagagtattaaaaccagcaaaggctgcgcttgatgaaagctgcccatacacattcaactacgtaaaagtgcgtgaaaaccctaacaacaaacgtagtaaagtaactggatttagattttaccctgtatatcaacctcaattcagggatgaagaactggaagtaaaagaacttcaagcgaaagtaacggcacgccaccaaatagatagtcatgtgtacgaatatctccgttattcctgtggtttcacttcggaagaaataaaccggaacaaggaaacgcttataacagcacaggaaaaaatagccgaccttataggagaactggctattctaaacggaaaatcacgagagaagaacaaccctaaagggtggattataaactctctcaaagggaaaataaaagacagctaagcaactaaaagtgcttccctaaatgtcatattttcaaatcattttctaaatttgcaattgtaatctttaaatatttattcatgaagaagaaaaattcactgttatttatactgctaatgtactctttgacaatgttagcacagaaagatataacaaaatttatgggaatccccgtagatggatttaaaaaagatatgattcagaaacttaaagctaaagggtttgaatacgacaatgaaatcgatcttttaactggtgaatttaatggcgaaaaagtaaatatttttatcgccactcaaagcaataaagtatggaggattgtcgtagctgatgcgatagaaaggaacgagcatgatattaaaattagattcaataacctttacgaccaattcaacgataaccctaaatacgttcctaaattggaagataacgattatatttctgaagacattaatcttgcatatgaaatgaaggttagaaacaaaagatttgaagctggattcatgcaaatgacaaatcccaaaagtcctcaaaactcaccagaaaagatacaacaagaattaactcaaaaaataagcgagatatgtccaaccgaagaatttataagaaaatcagaaaaagaaaaagaggacataaccaaagaagcagcaatgaacatcgtacaagaagctgcaatgcgctccgtatggtttatgattagtgaaaaatatggcaaattctcactaattcttttttacgataacgaatataataatgctcatggggaggacctctaaaaaacaaatagacgaagtacacttttgtacttcgtctatttgttgcccttttgttctattgcctgctcttggtaatattcgtaataccgtttgtagttgtcccgatctttggctgcatccacccaaagataacacatgaggcaagcgaacaaaagggaaataacagcacaaagaatggagtagaacgaaacccgtttatccacatagccaccatttttcattctattcccctgccgttcaaagtccgacaacacgttttttaggcgtttttcggcactttcaaggttctccccgtctatctgtacctttttggctgttgcgtcctctatgcgtttcgtataggcttccacgcgcttcaattcttgatataccagttctactgcaagctgcgggttcactttcggggtggtgtctttcctgcgtggtcggtattgtccttgcttagaggtggaaacctccttttccggacgtgagtttgtttccatgtgatatgctcatttggttatacttcaattttttctgtgtctgctcgatatgggcgagtgtgtaacctttcccaatctcgcttgccttgtattccgttccgctccgggctgtgacatagtagccgttaagttttccggtgcttgccctggcttcccgaactttgaatcccagtttgccaagttcctcttggaatttggcaaggtcaaagccctgcagcttcttcagtacctcgttcatggcttccttgatttccgctttattggcttttccgatgtcctgcgactgcacaaagtcccgttccttggctatggcgttggcggcttccgttgcccgtttccctatccagttgtcccgatagagttccccggaaagggatatccggtttgccagtatatgcaggtgcgcctgtttcttcttgctctccgtcccactgtgtttgatgatgatgtactggtggttcatcagtcccatgcgctgcatgaagtcgttgccaagttctgcccagtccgtatcggtgaagctggagctttcctctatcgaggggctgacctcaaaacgcaggcagttgttctttacgttcggaaaatcagtgaagtaaggtttcatctcctgcaccatttccgcacccgtacacccgtaaagctcatgccgagctatttcggtggctgctgcctgcccgtctatctctttggcgaggtcgtactccagtgccgccacgccatgtgatatgcttttccctttccctatcatcgtgagagtattttttggagttctgtgattagtgtccggttctcctcgaacacttcccggtactggcgaccaccgaagtagttgttcagtctctgaagtgtccccttcagccgggcgatgtcccggagaagttcccgttcttcttctgtgtacctctccctggggcgaccaccaagggagagactcctgcagtactccgatgtgctcagaccgcaccgggctgcctgctccgaaagtgccgccttttcaagtgcggagcatcggaaggttatcttttcgttccgtcttacttccatgccacgaagataggcaaaaaatctttttgagcaaagcgagaaaagcaagaattgtccgacaaggacacttcttgctatatatacacataccgcatgggaatacacacagcgctaacacactgcatagccacacacttttttcttttttccctgccattcccacaacggaacacggagagcggtcaagggttcgagcggaaaaaaccgcacagcgaagctgctcaggatttttttcagatccgaacttgcgaagcccttgacggcttcggagtgtggagttacctttgcagaccgaaaagagaaaaaaaacacagttcgcttcactaacgctgactggtcaaaggataccctgttcagatatgattttttttagaatagatacacttacggtagagaagtctgacttatcatagacatccacaagataaacacgaccttcactttccgatgcacaaatcgtgtatgtgataacacgtgctcccccagacttaccctttcccttagaaacaatggcaagtcttattttacggatacctgggctcagttcatccccctgcatggggttcttttccaatgactcgataaaatccttcatgtcagccttaaaagacttatacctttttgcaaggattttcgcttccctctcaaaatgtggggtagtctttacttcaaagctcatcaagaaatgcgtttgcgctcttggctggctgctcaccagcttcgattcgtttcacttcattcaagccctctcttattcgagtggctattttttcttctacggacactggcaccagtttaaaatcaccgatacgtgaagtcagaaagacggattctccctgaatagcacgaagaagggtcgctgtctgattcgtccgaaatttgctcaatggaattacttgcatatatcttaaacttttttgattgtgatacaaatgtaaccattgctaccgatattgtaaccaaattaatatactttaacacgcggggggaaaagcttcaataaccgcacaatcccccaacccccttataagggggctttgtctttgttttcccttttgtttttcatccgttttttccgaaagtttggaagcaatctcaatcttatgagcctgtttctatcttaacatcgactatctatgtctatcctcgcgcgcgcgcattatgcgagggaaaagccctccaagtacgacataaagaatactttaatacgacataaagaataaaaattaacactttaaaaacgacataaagaataaaatatacgacctttatttgttgaggtcgtactttattcgtatatttgctgcaaacctataaaacagcactatatgaaaccaactacttacattgattgggacggtctgaaagatattccgttcttctactgcgatacaaaggaagatgaggaaagcaaagacttcgacatatactatcaagggaaactggtactgcatgactacaaccattgcggacactacctctacacagctgctgtgctgttcagcagaatcaagaataaaacggcagactgggtgaacctgcgcaacctttggattctgcgtgattgcgtgcgtgagaattataatcacggcataggggtggacgacattatctttggagagaattttgatggcgagaacctctatacacttacaccgcttactaagaaacgcttcgattatttgtgtaggcgtattaaggagcttgacccatacgcaacaatctaaaaaagcaagtcctatgagcgaaaacctaccaaacaaagccgtattccagtcctatatatggacatgtgccaaatacgatttcagtccttacgaaaagcgtatcatatatcgtcttatcgaatttgcccaacgatggttggaaggtattaaaatcaaagaccatatgcacaaaatcgagccgacagactgcggtgtaaatatcactatgcctgtggcggatatacttcgagatgaaacagacaacaactataccaaagcaaaggctgcatttacctcactttcaaaaaagggggcggagtatgaagatgatgagatttggttctatacagccataatagagcaccccaaaataaagaaaggcacaggcgttgccactttccatgtctatgagcctgtttggagagcagctcttgatttcactaagggttttaaaaaatatgaacttgtaaccgctatgaaattcaaaagtgtttatgccatgcgattttatgaactcatgtcaggacaaactacacctttgtttgtgccgttagaaggttctgacgggcttcgggaaagattcaatctacaagggaaatatgaaagggtaaacgactttcgcagaaaggttattgatgtcgcaaaaaaagaacttgacaagttctctccttattcgtttgtggctaaggaggaaaaggaagggaagaaggttattggatggactctgttccctgttttctttgaagatagagaagaccctgcactacaggagcaagcacgaatggctaaagttacggcacggctccagttagaaaacaacgtatatgactaccttaaattctcctttgccttcaagtctgatgaaatcaacaagaacaagaaaacccttattgaagggcagaaccgcatccccgattttatgggattcttgggagaattgaagaaaggcgcacggctggcagaaaaccctaaaggatatgttattggcgctatcaagagaaaactcaaagaaatatagttaaaatcctgtttcagagaacaacgagaccaattattttctaattttatggctgataactttaaactaagagcttatgaaaaagattttatttttaagtgcatttttatttcttggatttggacttaattcttgttcggatactgatttaaattctccaacgaatgaagaaaatcaacctgtagagaataatacaaatgatattattaataatttagaatcatcttttgaagtaaaagcaagagcagaaggtgagcaagtttcttaccctgattattattgtggcagctattttaaagatggtatcttggtcataaaagtaaaaggcacaaatataaaagattataaaaaagaccttgaacaaagatgtaaaagccatctattcattatagaagagggcgttaatacaatgaatgaacttttgcaagttagagattttattaatagcaaagatgaaattggagtatggaaaaaattgggtatttctgcttgcggcatagatcctaaagacggaaaggtcgttgttatgttagaagatgcttccgaagcaaacatcaataatttcaaaaatgaagtaattaattcaccgctaataaaattttggcaactttctttttctgaaggaaacacctctttagaaagcaataaacaaaccagttctttagctataaccccaacccccatgataccaggtgcggatttttattgtgcccaaggtggaggaagcgtaggctatcgatgtgtttacaaaacaaaaccgtgtattgtaaccgcagggcatacagtcaaggctgttggtaataagattatagatactcaagatttaacaacaaagttaggagagtgtatcgagtgcgatgttacaggacatgatttggctgtatgcactcttgttgataaagttagctcatccaatattttcaagtataacaatacaactattcaaattgtggacggaacctatgacaatgtaaagaaagacaatatgatagcccttaaaggattttatcattctggtccaggcaaaattattgtagaaaaaacgaaattatcaggaagaacttttaccgaatttgcagttgcaacatataaatcacaagatggagatagtggaggtttgatattcagcccaaatactaaaagagccgttggaatccacattgcttctggtgaaataaaagttgatggtacatttcaaaaagcaggggcatttcttccatgttcagctattaaatggaaatatggaacattacctaagaataattaatataagcacagaaaagcaagaatgaaatttcattcttgcttttctgtttgttcctgctgataatattcataatacctcttgtagttgtccctgtccttggctgcatccacccataggtaacacatcagacaggcgaacaatagggagaaaacagcacaaaggattgaatacatagaagcgttcttgtccacatagctgccgtttttcattctgtttccctgccgttcaaagtccgccaatacgttttttaggcgattttcggcactttcaaggctttccctgtctatttctacctttttggctgttgcgtcctctatgcgcttcgtataggcttctacgcgcttcaattcttgaaacacaagttctaccgcaagctgcggatttactttgggcgttgtgtcctttctctttcgggggctgtactgtccctgcttataggtgtaatcctccgtctttgggtttgagggtgtttccataattcctgctgattgagttatacttcaattttttctgtgtcttctcgatgtgggcaagcgtatagcctttccctatctcgcttgccttgtattccgttccgctccggctcgttacatagtagccgttaagtttgccggtacttgcacgggcttcccttaccctgaagcccagtttttcgagttcccggctgaatccggcaaggtcaaatccctgcatccttgcaaggacaccgtccatagcctgttttatctcttccctgttggctttgcctatgtcctttgactgtaccaagttccgctctctggctatactgttggcggcttccgttgctctcttccctatccagttgtctttgtagagttctcccgataacgacacacggtttgccagtatatgcaggtgggcttgtctgctgttcttctccgttccgctgtgcttcacgatgatgtactgatggttcatcaagcccatgcgctgcatgaagtcgttgccgagcttcacccagtccgcatcggtcatgcctgcactttcttccactgaagggctgacctcaaaccgaaggcagttgttctttaccttcggaaaatcaacaaagtaaggtttcatctcctgcaccatctcttcacctgtacagccgaaaagctcatggcggtgtatctcggtggctgctgcctccccgtttatctctttggcaaggtcgtactccagtgctgccgtgccatgagatatgctctttccttttgctatcatcgtgaaagtatctttttaagttcattgattagtgcctggttctcctcgaacacttccctgtactggcgcccaccgaagtagttattcagacgctggagtgttcctttcagtcgggctatctcccgaaacagttccctttcttcttccgtgtacctctctttgggtcgtccgcccagtgcgagtgtacggcagtactccgatgtgctgataccgcatcgggctgcctgttccgcaagtgccgccttttcaagtgcagtgcagcggaatgttatcttttctgttcgatttacttccatgtcgcaaaggtaatcttaaaatccttttgagcaaagcgataaaggcaagaatgtccgacaaggacacttcttgctatatatacacatgccgcatgggaatacacacaacgctgacacgctgcataggcacacatttttttctctttttcctgcctttttcacaacggaatacggagaactgtcaaggggacgggctggaaaaaccgcacgagcctgcgagcgcaggatttttccggatccggacttgcgaagcccttgacggttacggagtatggagttacatttgcagacaaaaaagagaaaaattacttattcagtaatactttttctttcgcggttaagttctccaattcttcatcacttataggaataacagtataggttttcccctcgtgatgaataagtacattgtcgcctttactcgccaaatcaagcatttcctctattcggttagcaaattcctcggatgtaagatttataactgccatatctttaatttttacattgtttttttacgtcatttatcgtcatagtgcccccaaacagaaataacaaaaacaacaatggtggtttcgttcaccgtatatctaatacggtttttcttatcaagttgccttgaccatacaccctgcaaatacttcaactgttcggggtgtccagtcccggtgtatggatgttctttcagctcatccaatagcctctctaactttttgaagagttgcggagaggactttcttagcaacagtacatgttttgcagcttcttttgaaaattctatctcatacattgcactcatcctctatacggttcaaaaaatcatctaatgattcatccttccgcattttaaaagttcgtccctgcttaatatcctcaatacccctctgaatagcctccaattcttcccttgaggggaaatcctcttccgtagccgcatatacgactatgggggcggcattacgacgggaaacaaagattgtctctttttcagccagttcaaaatatttcttctgattggcacgaaattcacgcgttgtaattatctgcataatatttatatatttgatttacaccgcaaatatagctataaaagttcaacctccaaattatttgtgtacctatttgtgtacacgccattaaaagccatattcaagcctaccgcccgttggttggtgttgctttgctttttcccctcttttcgagttgattttcagcctttttccctttaaattccccttgtctgttataagcatcgtctgtaatatgctctatcacttttgcggaaacaccgataaataaagggattaaaacatgtgtttccctacactttgggagttttaatcctaca

SEQ ID NO: 167 - DNA, 8943 bp, Phocaeicola dorei; identical to SEQ ID NO: 4
  source 1..8943: mol_type = genomic DNA

SEQ ID NO: 168 - DNA, 4148 bp, Phocaeicola dorei; identical to SEQ ID NO: 7
  source 1..4148: mol_type = genomic DNA

SEQ ID NO: 169 - DNA, 2877 bp, Phocaeicola dorei
  source 1..2877: mol_type = genomic DNA
tgctaaaagggttactactattgacaacgaacctcccacgtatattacccacttttcttgcacatccccgaaaattgaagaaagcacgactgccgtagttatatacttggcaatgtccattagccattttcctaattcttttttcatactgcaaatataataatttaattggaattattgtttatccccctcccgtcccccaaagggggagcgaccaaacggcagcactcactcaatggagtgttgctgttctttagtcctcaaaaggcagttgtggtaaatctccttgttctttcatcacatctattgtacctttcagctttgttgatgtcgtcttatattgtggataattttcattaatgtaagttgttgcgaatgttaccctatcaccgttaaatacgcacatgggatttatgtagtattcaatatccgctctacctcttgctattatttcggcactgcaaagctcgcctaaagctctaaaaatggatacttctgaataccctgtttcttccttgcattcgtccataaaaaacataaagctgtcttgattaggttttagttggccaaggatatatttaaagactttgattgatgcaggctttaaatcaaaaaaagccttgaatcctgctaaaaagaacttcgcaaaactttctgtatctacggctttatttcgtataaatacagaattaccaagaatttccccattaccgtcaactgcttttagaatggctgattcatctttatttgttcccttaactgatttagaaacaagtgcactccctatattaactaatgcttgttttgcaaagggattttctttgttaagctcgaaatctgatagtttacgctttgtcatactctactttcattttcatggtgatttttgatagtaacagtaacattgaatgttattattactttcacaaagatagtaaaaaatgaaagtaatagtttcttttaatgtgttatttatgaaactttcactttcttactatgaaagtcccactttcatagtatgaaagtcgcctatattgattatcaataacttatgctatgtttctttcttaagctcttaaatacccccaaaaatgccattttttagcttattttctttcatcttctgcactttcaaaaattacccaaaaaatgaaactaaaagagccccttcaaaagaggggctctccacgtccacgtttgggtaagttttgcgttttaatgcaaccttaaaatttcagttcttatgaaaaaaaccttctgttgttgaaatgctcatccccaaaatagaaaaacaaccccaaaaaagcaaagagaaacaagggtttaacattgagcaacactccattgagtgagtgctgccgtttggtcgctcccccttgggggacgggagggtgttaaagcgaatagcctttgttatgtctgatatacctttcgggatgcagctttttgtgctgttcctcgataacccctctaagctgtgcattctcttttcgcaagcggtctgccttttcttcggcttgcagcttcgagttctggaagtattttagaactttctggctttgtttctccgcttcgtgcttgtaatgctctctcatttgggtaaaatcctcgtaaatcgccttattttgcttctcagcccatttttcacgcccgattaatggcggtgtgccgatttggggtgctcttgtttcgtaattcagctccatactgttactcggataaatgagccgttcctctatcctgccgtaatactcccttacactgtcatgggtggcggtgctgcctttaatacccctctgaagcccgaatttgttctgcatgacttttccgtaacagtcctgcaactccgacagcttgcgtctgtcacccatgacctctttggcggaaagtctgccgtccacggttaacggcacaacgacacaatgaatgtgcggtgtccgctcgtccatatgtagggtgaagtccacaacgtttctccccccgaaccgttcgctgacgaacctgtagttctcgttcatccattgagtgagcctttcgggattctccccgatagctgtcatttcctcgtgacttcctgtaagaactacattcaggtgggtaacggcatccttgcggatggctgtctttcccttgtaaccctcctgtatgcgtctgttgattctttcctgtaatgaccttcggttcttgaaattgtcatagacatagactttcccattctcgcccaaatggtaaaatagatttttttccgaaagtttcggatctgcattgaggactttctttgtccggtctatatggctgcccaatccgccggctttaccggctgttcctttttcgatgtgaagtactgcgaatcccatttcttttccctattgtttttttggtttagtaatgcaatcaaagagggcggaagccctcccctttcggcttgtccgaaagcccacacttcggaacgaagtatagtgggctatacttccattaacgaaagcgcacaacaaaagtaggcaaaacgcttggaaattccaaatgctttgcctacctttgctgctgaccaaacggtagccgaccgatacgggagagctgctgacattaaaaagccgctggagtgaattgacggattcccgacatctccagcggcttgatgtatgtaagggtagaacggcagggtttgaacctgcaacccctcctctaaaaattgagtgctctgtccagttgagctacgtttacccttagttccttattttgctttttgggcttctttcttgtcttggtggttgaagtaaaccactccgacaatggctattactgaaacaagtccaaacattaccaatgctcccatgtttattctcctttctttttgtctttaacaagccaaagacc

SEQ ID NO: 170 - DNA, 2783 bp, Phocaeicola dorei
  source 1..2783: mol_type = genomic DNA
accgaaacgttccttgcagaccgcagcgaattgctggagttcctgcatggtggtttcttgcttgattactattaccccctcccgtatgggtgctgctttagtctgcatcttctgcccaaccgtatcgaaatatctctgtttcgcactctccagccgatgggagatgctatctccaacccagctttcattcaaatgactaagttccggacgaacatagtccaactctttttccctaaagttgtgaatctcgctccccggcttcactgcttgtacatgaatacttgttgctcccataagttaacatttttgtgacaatcgataacagccggtgacagccggctgacagggggttaagggggcttgtccccttacacacgtaccctttagggtgctagtgtgctatcaccatactgcataggtgcgaagttagtgaatgttttgtaaatgcacaaataaaggggaaaacatttggatttgcgacaataaagtactacctttgttgctgaccaaacggtagctgaccgatacgggagagttaccaaaatacaagccgctggagttaattgacggacatccgacatccccagcggctttatttttgcctatctgcttcgtctaggcataccaatacctctactaaaaatgtacttcaaagatacttattttctaccgacttgatagtttttaccccatattcttggacatttttcccccatgaggttatctttgtagggtgaaagagaaacccataaacggggatagattgaatgctgggaagcataaacaatcggggtaaggttagcgaaccttgcctttcatcccccattataactttacatagaggaactttatctatccccccccgcccccaaagggggagcgaccaaacggcagcttcactcaatggagtgttacagttcatcaaaaccaagtgataactgtcgtttctctgcttcttctttcttttgggcagctaaagtctttttccgaacgtatgtttttgtaaatgaaaccctatccccattaaagacaatcaacggattaatgaaccaattatattcgtttggacctcttgctatgatttcactttgtacgagctctgccaatcctttgtatatggctttgtctgatttgtattgggtgtattctaagcattttcgcctatcgaaaattatcatatcattcttaggcttcatgcaagttagaatatacccgaaaacccgaatagctgattgtgatagattgaaaaaagcggcaaaattcgcaaggtatagttttgcaaattgctcttcatctacttctatttgtcggataaacgaggttttgaatacttctcctgtatctgtatcagcaacagcaactacagcttttttatcacttcccgtactacttttgtatttcttaacaacgtgattttcaattccttcaattgcttgtttcataaaggggttttcttcgtttttttgaaaatcggttaatttgagtactttcttattttccataaacattctatttaggcaaatttgactttctatatatcggtgaaaaagtataatttgattttccacaaaggaatatttaaatttccattaatacaataaaaaagcaaaatatattttcctttttaacatctaataggaaagagtgactttctaatatggaaaatcagattttccaatatggaaaataccctatattgagtatcaactacttaacttattctatttcttaagttcttattataccctaaaaacggcatataatcaactacttaaaaaatcatcggtcggggagcgcccagcggcaaggggcgggaccacccgtcccgacgagcgcccacaccataaactttttttcgaataagcacacaaccgtttttcgaaccctgcaaaatttcttccgaacccgaacggcgtaacactccattgagtgaagctgccgtttggtcgctccccctttgggggcggggggggttacatacccatgccgaaacctctgcttctggtgatttgcttgagtaggtctttcccctcttccatagcttttgatatgtttgggaaatgatgccttaaagcctccagttgttcggaattgaacaagtctttcatcttaccaagttcttttttcaattccttggtttcggtctttagttcttggttctccgttcttagtcggttactggttgtccttgcattgtccatttgctgtctataatactccttgtcgttctcggctttgaatacctttgtgccgtttcgctctttttcaagtatagcctttcccagtctatcggatagctgttcattttccccctctaaagcctttattttggcttttaaggcatctttttccctatcgttaaccgttttccctatcaagccgtaaaacttctctgaagccttagaaatgagtttttggacgtttttctttgtttcaatggaacgtagttctttctgaagctgaagaagctggttttgcacgtccttgtgcttgtctaacgcactggatatatcgttggatagttcctgaagctgttctttcgcacattcggtcttgtactgcatagccgataagtgtttgcgatcagaagaaacaccacgttccatgcccagtgcttcagatgctatggtttggagttctgccatgtcatcacgcgataaacgcacactcttcccgttcggctgcgtccaatcgaaaactacatgggcgtgaaggttaggtgtccattgctttgcgttcatgtatccttcgtccttgtgtatatggatttgaaacgcttcaat

SEQ ID NO: 171 - DNA, 1481 bp, Phocaeicola dorei
  source 1..1481: mol_type = genomic DNA
cctcaaatccgcaactacgcgcctaatatgatacagaagcgaaaagaatctgcatcgttagtaaaaagggggcacagtgcatcgaatgtcaccataaagacatataaatgccccttaccccaccatgcgacttgaggcaatacgcaaaatcacgactataagttgtcggtgttatccaaagtcattctggaacacattggcataagcattgttgcatgaatagatattcagcacatacttccttgatgtcctgacccatttggctggcacagagatgaacttaaagacaaacgtcttgatgcggcttgttgctttgagtccgaacctcttcacgtcaagcctcgccatgatgaatttatagaagttgcgtatgagtgccataagcagaagaaacaccgtgttttctcccataaaggattttggaagcctgttccagccgaatccgttattcatatcatcgaagatgcgttccttccctccacggaggttatagaattcgacaatctctttctcggaagactcgtagtcatttgtaaggatgcagcggtaggtgtattctccttcccacaggtcgagttcgccgtctatccgcttctgtctttgaatcacaagacggtatgccttccctttccatttctcgatgagaatggaggccagctcaaactcaatgccgcccaattccactttcttccaacctctgagggcaaagatgtcattgtagagcgaactgcatcggttagcacggatatagaaggtcttgcagtgtttagcaatctcttccactatctcttcagaacacgagccgcaatcagctctgaaacggttgataataagcttgttttgttcaaacctttcaaagaacctcttcagcgtgtccttctggtggaaacggacatttgtgttgccgtcgctgttctcaatgccgacaatcaagttgccaataaccgccacgccagggcgataaccaaggaacttcttgtatgtaggcttcgcatcaaacttctcagcctctatgaactggtggtcgaagtcaacgtcatacccctcgccctctttcagctgccctgtggacaataggcaattgaggagcagtgtattcagcttgtctgccgtgttgaagtcgtaggtcttgccagtgtcggatgtgtaggaaatgttatcctgggtcagttcctttatggctctaagaatcgtgtcggcactgcatgtgcgaagtgtcggatgaagcgaaaggtggtacatcagatgagtggtgacatcctcgatgcatgagccgccacaaaaataaacgctcataagcgaacggatgatttcgctgtattgataaccatacagcctgcatctcataccgagggttgagtcgattacagatgagagtctggagtcaaattgctccattattgaaaatattcctccaaaaggagtgagtttctcggatttaattgctacctttgccatgtctgtcgggtttgatacatatt

SEQ ID NO: 172 - DNA, 563 bp, Phocaeicola dorei
  source 1..563: mol_type = genomic DNA
acaatcgacggcaaacgtatcgaaacgatagaggtgtccctaaaacgcatggaggtcgtgcagagccgtggcgtgtgtaacaagaataccccataccacgggcaaatactgaaactgatgaaggggaacatgtcccttatacggaaacgaatgacagcataaaaatcggggcggcgaaagccgcccgcaaaaacaaaatagaatgaaccaaatagcatataaattcgtgtcgtgggacgttcccgcactcgaaagccttgcaggctcaaaagcgtacatattacgcaaacggctcaatgacgggggaacgctcacccgtgaggagaaagactggattacccgtgaggtaaaccataacacctatttcaaggactccattccgcttttagggtatcgtttcaactttgtcgatgtactgaaaacattcgtggtaaagcagtacgggcattacacggaatacaagggcgtggacaagacgagcatacgctccatgttgtacggcagagtggaaaggattgtcgaattataaaatcggggcggcgaaagccgccctacaaaaaaaa

SEQ ID NO: 173 - DNA, 498 bp, Phocaeicola dorei
  source 1..498: mol_type = genomic DNA
tttttttcatgccgcggagcgcggtatggaaatctgttgtcagtagcaaaggtagttacggggctcacgctgctgcaagatcgggccgcggggcggtttgccgcaaaatcttcctctttccctgcgggcgagcgtattttccgacaaaatcttgcagcagctatccccgacaccttttgatgctaccgaaacagattccatccataccggctccgctacggcataaaaaaaaagtcaaaggttatgagaaacgaagagaaaaataaatggaaacagaaatcctccaaccttccacttggcataaaggcaaaggtcgggttggcggtaaaggtcggggcggtggctttgggcttccacgtgtggggtatcgactttatttgggtcgttttgggcttcacgttctgttatgacatcctgcggggcattttctcctgccttgtttctctcgtggctctaaccggctttttctatttcctattcactcacatcttctaaatt

SEQ ID NO: 174 - DNA, 497 bp, Phocaeicola dorei
  source 1..497: mol_type = genomic DNA
aaacacctgccgccgcttacccccgcacaaatcgaatgggggtacaagaactgcatcgagcatatcggacgccgcacgccgaaaggacttatcacctgcaccgagtgcggccacacgtggcagagcgaaaacggagaactcacggacaatctgttagggtgcgagtgtccgcactgccacaccacgctgaaagtggaaaccaccctgcgccgcaagttcaacgattacgagtatttgtgcatcgtaacccgctgcaagggttttcaagtcctgcgcttcgtctatatcgagtgttgggcgaaagtgggacagacgcccgtttacacccatatcgaagccgtacagcggtggattgcccccgacggacgctccgcaaccttcgcacggctgcgcccgatgggcttcttcgttcacgggtggagttggtcgagcgcattggaactgcgggcggagaacgacgggaaatacaacatcacgcccacacgcatctatccccg

SEQ ID NO: 175 - DNA, 386 bp, Phocaeicola dorei
  source 1..386: mol_type = genomic DNA
ttcattcgttttcatattctcgctttttacgggcggcttttgccgccccgaaattttttaatcagacaagttccactctaaccctgctcatgttcgcccagaacacgccgttgcagtagtaggcgtagccgttatgccagttgctcctgcggcgtatcacgtcctgctcgggtggtcgtatctcgatactcgtggtgtagatgttgtgtcccacggtaatgacgaggttgcaccttcgccatatctcggaatgggttttgaacccgtttttcccctcgacgagcgcaagggccgtcttgactgcttcccgaacttcccaatcccactccccgaagggtttgagcgggcgtgccatgtagcttttatagatgattttcattgttata

SEQ ID NO: 176 - DNA, 352 bp, Phocaeicola dorei
  source 1..352: mol_type = genomic DNA
taaacccaacctccagcgggtgcgggactggtttctcttcgctaccttcacggggttgtcctacgccgacctgaaacgcttgtccgaaaaagacatcacgcagtcggacgacggaacgtactggatacacatccggcgccagaagaccgaaacgccctcggccatccgcctgctgaacgtgccgttgcagatcatcgagaaataccgccacgagcgtaaaagcgacaggattttcaacctctattgccgggggtatctcatcaagctcaccagagaactgggacggacatacggcttcgacatgacctttcacaaggcgaggcacaatttcgggacacatatcacgctctcg

SEQ ID NO: 177 - DNA, 318 bp, Phocaeicola dorei
  source 1..318: mol_type = genomic DNA
ttatgaaagttacgagaactcctataatattttagcctccttcgtgaaaaaaaggaaggaaaaggaggatgtagcgttgcggagccttgaccgggagttctacgatgattttgaaatattcctgcgtacagatcgtgaaatgaaacccaagacagtacacgagcatctttaccggttgaaaaaaatgaccaagcgggctgtcagtcagggtacactccggcgcgacccttacgggaagctgcacccggaactgccccggcgcaagagccgccatttgaaactcgaagacctcaaaaaactgatggaaactcccgtcgg

SEQ ID NO: 178 - DNA, 299 bp, Phocaeicola dorei
  source 1..299: mol_type = genomic DNA
gccatgtagaggtcatgcgctgcgggcaggtctgcgggacacacgaaatgggcgttatgcaggtctttcccgaaaaatcgcagcaggtcgatgtagtcgcaccattccgtcggtttcccgatagcgtacccgttacggatggcgatacggatggccggccaatagtctgcgatattgcgggaggaacgggcgaaaaatcgcacgagtgccgtttgtcccgctttaagcagcgtttcggccttgttctccgagagcagcaggtggataaggtcgaaaggggttacatcggggagttgttt

SEQ ID NO: 179 - DNA, 298 bp, Phocaeicola dorei
  source 1..298: mol_type = genomic DNA
ggctcgccgccccacaataccaaaaaatcatggcacaaggaacagattatttcaaactgacgatacagaactatctcgacgcacgggcacgggaggacgaacttttcgcaccccgatacgccaacccgaaaaagaacattgacgattgctgcactttcatcatcaaccaagtacggcagagcggttgcaacgggtttgccgacgaggaaatatactctatggcactccactattacgacgaggaggacatcgacatcggcaaacccgtcagttgcaaggtagtggtcaatcacaccgt

SEQ ID NO: 180 - DNA, 264 bp, Phocaeicola dorei
  source 1..264: mol_type = genomic DNA
ctcgtctttcactgcggacgccatacctacgccaccgagatcacgctttcgcatggtgtcccgcttgaaaccgtcagtaaaatgctggggcatagccgcatttccacgacgcagatttacgccaaagtgaccgatgacaagatcgacatggatacccggtctttagaggaaaagattgccggccgcttctccgtagctatttaatctatcattgacaatcaaattcacaacgattatggaaacgaataataaagagataaaacg

SEQ ID NO: 181 - DNA, 254 bp, Phocaeicola dorei
  source 1..254: mol_type = genomic DNA
cataaatggaaatggctgaagctcgcaaatcgtccagttgccggttgatttcccgcgcggcgttacttttacccgtggcacgtccggatgcccacagtgcagcgggtacggacattttcgcactaaaagccgcttctgaaaatttgccgacaacaagtttcgccatgaccgggcaatgtccctcgtcattcatttcgctctttttgaggtagaacgtaaccgttacatccgtctgtttcataactctatttttt

SEQ ID NO: 182 - DNA, 253 bp, Phocaeicola dorei
  source 1..253: mol_type = genomic DNA
tgcctgcggcataacgcctcggcttttctttcaatggcttccacgtgccctgccagcgcgtcgaaagccttcacgtccatacttattatttccatgttctgtttcattttttgtttcccggatgcccaaaagtacacaaatgaacagtatcttgttatcagccagtggtatatggacgtatccgtcttaaaagtggcagcgagtggcgccacgtccggcggaaacgatcctccgccgatacgggatcggcacg

SEQ ID NO: 183 - DNA, 241 bp, Phocaeicola dorei
  source 1..241: mol_type = genomic DNA
ggccgagagtatgagcgagtcggctttcagatagtattcgttggtaaacacgcaatggtgcatggcctcgccctcctgccgtatggcttcaacgctgtccaataccttgatgcagatttccccgtcggaaaactccactccgaaaaaccgccctttggcttcgacaaacgaggcttcctgttccaacgccttgcgccgttcctcctgccgccgttccatttgcatgtgccgccgttttttt

SEQ ID NO: 184 - DNA, 241 bp, Phocaeicola dorei
  source 1..241: mol_type = genomic DNA
tcttctgcccgtcatgcgtcagccgtgcgttgaagcgtcccccgagtgcgtgaagggcgtccttgacgggcttggtgtccccgaatacggctatcgccttctcggaatagtccacgatgataaacccgccttgcacgctcgtttcagtgcgttccgcccgtttttcgtctttcggctcgggcagacatatattctcctcgtttcctgcgatatatgccagcctgtcgatgtacccttcacg

SEQ ID NO: 185 - DNA, 206 bp, Phocaeicola dorei
  source 1..206: mol_type = genomic DNA
aatttctgtatctcggattccatgtatagtaccttgccctgaatcaaataatagggaatgatccgcgccgtgcggtattcctgcaatgtacgcctgctgattttcagcagccgggacaattcctcgtcggtgacgaaccgctctcccttgagtgtccggcctccggaggattccagtttatccagtgccttgccggccttttccaa

SEQ ID NO: 186 - DNA, 200 bp, Phocaeicola dorei
  source 1..200: mol_type = genomic DNA
ggcacttcatagtcgattttcgtcttcttgcgggcggtcttgatccatacctcaccgtcctcggccacttccagatcctccgtcgtcaggcggcacatgtccccgtaagggatacccgtgtagcaggagaagaggaacaggtcgcggatatggtagagtttcgggtcgtgcaggggtgtggtcatcagccgttgtaactc

SEQ ID NO: 187 - DNA, 200 bp, Phocaeicola dorei
  source 1..200: mol_type = genomic DNA
gaggtggccgaaaagccgagaatgacggtacgcacgcttcgggtggtcgaacactcgtaagaggggtcagtgtattccgtttcgttgagttcggcgatgattacgccctgcaccccttcgggcatgatgcggcgtaacctctgcgctcctatttccgctatgcggtcatgctcggctttctctttggcggcggcgatggc

SEQ ID NO: 188 - DNA, 200 bp, Phocaeicola dorei
  source 1..200: mol_type = genomic DNA
cccgcgaacgggtcggcagtgataatcccttccgcgatggcttccccgacaatcgtgttcaaccgtgtgacaagcaacacgatagttcccagggcaaagcggcgctccgtgcgtaggtagaggtcatagttgtcgatgaatgaacggttcagggccgtgaaaggaacatccgacaacttgtatttctcctggatgaaagc

SEQ ID NO: 189 - DNA, 196 bp, Phocaeicola dorei
  source 1..196: mol_type = genomic DNA
ggtttaccgttcgggcgttctcgcttcgtccgttcgcccttttggtttccggattccaaagcgatggatcgacaaacgcgttgatattgatcggggccgacttggcgtcgatgcttaccttgcataacaatttacatgttccgtccttgcggactttcgtgcggttgatgtagaacagcagggagaacgtgctgcg

SEQ ID NO: 190 - DNA, 193 bp, Phocaeicola dorei
  source 1..193: mol_type = genomic DNA
cgccggaagagatccgccacacgcggatcgtgcttgtcgatgaaataatggctcataacgcggcggtattaggatagtgcgacgattgcagcagtttcccgacatcttccggtttgtagaagattttgtgacggatgcggctgaaaggcagcaaccctttctcccggtaggtttgcagggtacgtttcgatat

SEQ ID NO: 191 - DNA, 187 bp, Phocaeicola dorei
  source 1..187: mol_type = genomic DNA
aagcgttattttgccggattatccggggctaaaaaaggcaacggataagtagcaaatctttctcttaacctttcattatcctgcattttagcgatttggaaaggtatagaagaatttggcttaactctcctcaataccaaacacttactttatttatccaaattttgccgtttttttgcgagttctt

SEQ ID NO: 192 - DNA, 172 bp, Phocaeicola dorei
  source 1..172: mol_type = genomic DNA
gtggatttccacccgcccgttttcaatgctgataggttctcttgtcgtcatagtcatacaaatttatcaatttttgttatactgttcaaccgtttaccgttataatatctgccgtttccggttcgtcctcctcgtagagatttattttccggcctttggtctgttctttcag

SEQ ID NO: 193 - DNA, 171 bp, Phocaeicola dorei
  source 1..171: mol_type = genomic DNA
gaactgaccgaggaggaaaaagccgaggcacggcggaacgccatacggaaggccgagagcgaagcctacgccaagttggcgaaagccaagtccaaacccaagaaaatcgaagataacaaactaatgcccagtctattttagttatgaaaccgagaacaaaattccaacaga

SEQ ID NO: 194 - DNA, 161 bp, Phocaeicola dorei
  source 1..161: mol_type = genomic DNA
gtttcttccttgcgatccacgccgacacgcttgcggaactcctcgttatgctcgcggaacaaggcaaggagggtgaacggtttctgcccgattccttccacggcgtttttgaccagctcggccgtcacgaaaccgaggcttttacgaatatgacggtaatg

SEQ ID NO: 195 - DNA, 158 bp, Phocaeicola dorei
  source 1..158: mol_type = genomic DNA
gtgtagtgggtcagtttgcagacactccacccgtatttcggacttttgccgagcgtgaaaacgggatagcggtgttcgttcttggggtcgtattcggagaggtgcgccgtttgcgggaaattggccgccgcctttctcaactccccgaagccgttgcg

SEQ ID NO: 196 - DNA, 156 bp, Phocaeicola dorei
  source 1..156: mol_type = genomic DNA
gctgttcccttttcccggttcacgccgacacgtttttcgaaatgttcgatgaacgtccggaaataacccaacagggtttcctgcccgaaagccgtccccaacaacagattccttatttcttcagccgttacattctcacgggtggctgacagttcg

SEQ ID NO: 197 - DNA, 154 bp, Phocaeicola dorei
  source 1..154: mol_type = genomic DNA
accacctgcggttttaccgttcaccatgcaaagaaccctatattttgcccgtaaagataaccgtttttttccgtttttcatggaaatacaggttatgttaccggcatccggggttttattctttgttccgctataattttcataactgtaaata

SEQ ID NO: 198 - DNA, 154 bp, Phocaeicola dorei
  source 1..154: mol_type = genomic DNA
aatgtccgtttggctgatttcctttgtttcggtatcgaccatgtggtacacgtagccacgggcggtgtgttccaccttgtaaacgacgtaacgctttctgctcgcacccgcaccgataccgatgattacctggttttccttgactacctgcacc

SEQ ID NO: 199 - DNA, 145 bp, Phocaeicola dorei
  source 1..145: mol_type = genomic DNA
gggtttaccgccgggagcgcaaccgtgacggcggtattgtcgagctgtattcgctcgaaatgatcgccgcgctggctttccgcttaaaatccgggaatgccgaagccttccgacggtggcttgtccgaagggccacgacgaccgc

SEQ ID NO: 200 - DNA, 141 bp, Phocaeicola dorei
  source 1..141: mol_type = genomic DNA
gagaggaaaaggttatgggagagaaacggggagaaaacgatatgccgtgaacgctcgcgaaagtcggttcacggctcaccctgcatggaatgataaatcgcccgcgaacatttcctttcacgggcgattggcgtatcggag

SEQ ID NO: 201 - DNA, 137 bp, Phocaeicola dorei
  source 1..137: mol_type = genomic DNA
ttccgttcaattccgcaaatggcggcaatacgtttcagtgtccggttgagttcgttgttgctgtacatcggcagcagttttccttccggggccatatcccggtacttgtcgaggatgagcaacggtatgtcgagcaa

SEQ ID NO: 202 - DNA, 125 bp, Phocaeicola dorei
  source 1..125: mol_type = genomic DNA
tctggaagattcccggaagaaatgtatcgggggacaggaatgggtataaaagaagaacggccatcacggccgttcttctttttcagttcaatatcgtgttcatgccggggagctgccagacgacg

SEQ ID NO: 203 - DNA, 123 bp, Phocaeicola dorei
  source 1..123: mol_type = genomic DNA
ctgcgacccctctcgcaaacattcggtatcggcaggtactacgacgacgtgaaccccgagttcatggacgctttcgaggtggctttgctcgtggggcaggcggaagagcaagccacggcgcaa

SEQ ID NO: 204 - DNA, 121 bp, Phocaeicola dorei
  source 1..121: mol_type = genomic DNA
gctcctcacggagtatgccgcttttgagtatggagcggatgttgctccccacggcaggaacgaagactccgaacaggtcggcaatctggtggcgcgtgagccatacacggttctccggcgt

SEQ ID NO: 205 - DNA, 113 bp, Phocaeicola dorei
  source 1..113: mol_type = genomic DNA
ccttaattccgcaacactattacaaatataactttttaagtacctgagcaacaaaaagttgctcaggaatttgccatgtcagatttttcacctatcttagtgttgcaaatcaa

SEQ ID NO: 206 - DNA, 111 bp, Phocaeicola dorei
  source 1..111: mol_type = genomic DNA
acgtttcatgtcctcgtccaccttgcggtcggtcactttggcgtaaatctgcgtggtggaaatgctcttgtgtcccatcatgcggctgacagtttcgataggcacacccag
